(19) United States
(12) Patent Application Publication
(10) Pub. No.: US 2025/0305003 A1
(43) Pub. Date: Oct. 2, 2025

(54) GENOME EDITING OF CELLS

(71) Applicant: Editas Medicine, Inc., Cambridge, MA (US)

(72) Inventors: John Anthony Zuris, Boston, MA (US); Ramya Viswanathan, Cambridge, MA (US)

(21) Appl. No.: 18/863,890

(22) PCT Filed: May 10, 2023
(86) PCT No.: PCT/US2023/021774

§ 371 Date: Nov. 7, 2024

Related U.S. Application Data
(60) Provisional application No. 63/340,281, filed on May 10, 2022.

(51) Int. Cl. C12N 15/90; A61K 48/00; C12N 5/0783; C12N 9/22; C12N 15/11

(52) U.S. Cl. CPC C12N 15/907; A61K 48/005; C12N 5/0636; C12N 9/222; C12N 15/111; C12N 2310/20; C12N 2510/00; C12N 2840/203

(57) ABSTRACT

Strategies, systems, compositions, and methods for genetically modifying cells to include one or more loss-of-function modifications and/or to include one or more gain-of-function modifications, as well as modified cells (and compositions of such cells) that include one or more loss-of-function modifications and/or that include one or more gain-of-function modifications, are described. In certain aspects, such modified cells include at least one gain-of-function modification within a coding region of an essential gene.

### CROSS-REFERENCE TO RELATED APPLICATIONS

[0001] This application claims to the benefit of U.S. Provisional Application No. 63/340,281, filed May 10, 2022, the entirety of which is incorporated herein by reference.

### SUMMARY

[0002] Some aspects of the present disclosure are based, at least in part, on the discovery that non-viral DNA templates can be used for efficient knock-in of various cargos into primary cells, e.g., primary T cells. Accordingly, in one aspect, the disclosure features a method of editing the genome of a cell, e.g., a primary cell (e.g., a cell in a population of cells, e.g., a primary cell in a population of cells), the method comprising contacting the cell (or the population of cells) with: (i) a nuclease that causes a break within an endogenous coding sequence of an essential gene in the cell (e.g., an essential gene that encodes a gene product that is required for survival and/or proliferation of the cell), and (ii) a non-viral donor template that comprises a knock-in cassette comprising an exogenous coding sequence for a gene product of interest in frame with and downstream (3′) of an exogenous coding sequence or partial coding sequence of the essential gene, wherein the knock-in cassette is integrated into the genome of the cell by homology-directed repair (HDR) of the break, resulting in a genome-edited cell that expresses: (a) the gene product of interest, and (b) the gene product encoded by the essential gene that is required for survival and/or proliferation of the cell, or a functional variant thereof. In some embodiments, the method does not comprise using an HDR enhancer.

[0003] In some embodiments, following the contacting step, at least about 60%, at least about 65%, at least about 70%, at least about 75%, at least about 80%, at least about 85%, at least about 90%, at least about 95%, or more, of the viable cells of the population of cells are genome-edited cells, and/or about 40% or less, about 35% or less, about 30% or less, about 25% or less, about 20% or less, about 15% or less, about 10% or less, or about 5% or less, of the population of cells lacking an integrated knock-in cassette are viable cells. In some embodiments, following the contacting step, at least about 80% of the viable cells of the population of cells are genome-edited cells, and about 20% or less of the population of cells lacking an integrated knock-in cassette are viable cells. In some embodiments, following the contacting step, at least about 60% of the viable cells of the population of cells are genome-edited cells, and about 40% or less of the population of cells lacking an integrated knock-in cassette are viable cells. In some embodiments, following the contacting step, at least about 90% of the viable cells of the population of cells are genome-edited cells, and about 10% or less of the population of cells lacking an integrated knock-in cassette are viable cells. In some embodiments, following the contacting step, at least about 95% of the viable cells of the population of cells are genome-edited cells, and about 5% or less of the population of cells lacking an integrated knock-in cassette are viable cells.

[0004] In some embodiments, if the knock-in cassette is not integrated into the genome of the cell by homology-directed repair (HDR) in the correct position or orientation, the cell no longer expresses the gene product encoded by the essential gene, or a functional variant thereof.

[0005] In some embodiments, the break is a double-strand break.

[0006] In some embodiments, the break is located within the last 2000, 1500, 1000, 750, 500, 400, 300, 200, 100, or 50 base pairs of the endogenous coding sequence of the essential gene. In some embodiments, the break is located within the last exon of the essential gene. In some embodiments, the break is located within the penultimate exon of the essential gene.

[0007] In some embodiments, the nuclease is highly efficient, e.g., capable of editing at least about 60%, at least about 65%, at least about 75%, at least about 80%, at least about 85%, at least about 90%, at least about 95%, or more, of cells contacted with the nuclease. In some embodiments, the nuclease is capable of introducing indels (insertions or deletions) in at least about 60%, at least about 65%, at least about 75%, at least about 80%, at least about 85%, at least about 90%, at least about 95%, or more, of cells contacted with the nuclease. In some embodiments, the nuclease is a zinc finger nuclease (ZFN), a transcription activator-like effector nuclease (TALEN) or a meganuclease. In some embodiments, the nuclease is a CRISPR/Cas nuclease and the method further comprises contacting the cell (or the population of cells) with a guide molecule for the CRISPR/Cas nuclease. In some embodiments, the nuclease is a Cas9 or a Cas12a nuclease, or a variant thereof (e.g., a nuclease comprising the amino acid sequence of any one of SEQ ID NOs: 58-66). In some embodiments, the nuclease is a CRISPR/Cas nuclease selected from Table 5. In some embodiments, the guide molecule comprises a targeting domain sequence that is complementary to a portion of the endogenous coding sequence of the essential gene. In some embodiments, the guide molecule comprises a targeting domain sequence that differs by no more than 3 nucleotides from a sequence that is complementary to a portion of the endogenous coding sequence of the essential gene. In some embodiments, the guide molecule specifically binds to the portion of the endogenous coding sequence of the essential gene. In some embodiments, the guide molecule does not bind to an endogenous coding sequence of another gene, e.g., a different essential gene. In some embodiments, the guide molecule binds to and mediates CRISPR/Cas cleavage at a location within the essential gene that is necessary for function (e.g., functional gene expression or protein function). In some embodiments, the guide comprises a nucleotide sequence of any one of SEQ ID NOs: 94-131 and 2250-18850.

[0008] In some embodiments, the donor template is a donor DNA template. In some embodiments, the donor template is a single stranded DNA template. In some embodiments, the donor template is a double stranded DNA template. In some embodiments, the donor template is a circular double stranded DNA template, a circular single stranded DNA template, a linear double stranded DNA template, a linear single-stranded DNA template, or a close-ended linear double stranded DNA template.

[0009] In some embodiments, the donor template comprises homology arms on either side of the knock-in cassette. In some embodiments, the donor template comprises a 5′ homology arm comprising a sequence homologous to a sequence located 5′ of the break in the genome of the cell. In some embodiments, the donor template comprises a 3′ homology arm comprising a sequence homologous to a sequence located 3′ of the break in the genome of the cell. In some embodiments, the donor template comprises a 5′ homology arm comprising a sequence homologous to a sequence located 5′ of the break in the genome of the cell, and the donor template comprises a 3′ homology arm comprising a sequence homologous to a sequence located 3′ of the break in the genome of the cell.

[0010] In some embodiments, the knock-in cassette comprises a regulatory element that enables expression of the gene product encoded by the essential gene and the gene product of interest as separate gene products, optionally, wherein at least one of the gene products is a protein and the regulatory element enables expression of that protein separate from the other gene product. In some embodiments, the knock-in cassette comprises an IRES or 2A element located between the exogenous coding sequence or partial coding sequence of the essential gene and the exogenous coding sequence for the gene product of interest. In some embodiments, the 2A element is a T2A element (e.g., EGRGSLLTCGDVEENPGP), a P2A element (e.g., ATNFSLLKQAGDVEENPGP), a E2A element (e.g., QCTNYALLKLAGDVESNPGP), or an F2A element (e.g., VKQTLNFDLLKLAGDVESNPGP). In some embodiments, the knock-in cassette further comprises a sequence encoding a linker peptide upstream of the 2A element. In some embodiments, the linker peptide comprises the amino acid sequence GSG.

[0011] In some embodiments, the knock-in cassette comprises a polyadenylation sequence, and optionally a 3′ UTR sequence, downstream of the exogenous coding sequence for the gene product of interest, and, if a 3′UTR sequence is present, the 3′UTR sequence is positioned 3′ of the exogenous coding sequence and 5′ of the polyadenylation sequence.

[0012] In some embodiments, the exogenous partial coding sequence of the essential gene in the knock-in cassette encodes a C-terminal fragment of a protein encoded by the essential gene. In some embodiments, the C-terminal fragment is less than about 500, 250, 150, 125, 100, 75, 50, 25, 20, 15 or 10 amino acids in length. In some embodiments, the C-terminal fragment includes an amino acid sequence that is encoded by a region of the endogenous coding sequence of the essential gene that spans the break.

[0013] In some embodiments, the exogenous coding sequence or partial coding sequence of the essential gene in the knock-in cassette is less than 100% identical to the corresponding endogenous coding sequence of the essential gene of the cell, e.g., less than 99%, less than 95%, less than 90%, less than 85%, or less than 80% identical to the corresponding endogenous coding sequence of the essential gene of the cell. In some embodiments, the exogenous coding sequence or partial coding sequence of the essential gene in the knock-in cassette is 80% to 99% identical to the corresponding endogenous coding sequence of the essential gene of the cell, e.g., 85% to 95% or 90% to 99% identical to the corresponding endogenous coding sequence of the essential gene of the cell. In some embodiments, the exogenous coding sequence or partial coding sequence of the essential gene in the knock-in cassette has been codon optimized relative to the corresponding endogenous coding sequence of the essential gene of the cell to remove a target site of the nuclease, to reduce the likelihood of homologous recombination after integration of the knock-in cassette into the genome of the cell, or to increase expression of the gene product of the essential gene and/or the gene product of interest after integration of the knock-in cassette into the genome of the cell.

[0014] In some embodiments, the nuclease is a Cas (e.g., Cas9, Cas12a, Cas12b, Cas12c. Cas12e, CasX, CasΦ (Cas12j), or a variant thereof), the exogenous coding sequence or partial coding sequence of the essential gene in the knock-in cassette includes at least one PAM site for the Cas, and the at least one PAM site (or all PAM sites) has been codon optimized or saturated with silent and/or missense mutations.

[0015] In some embodiments, the essential gene is GAPDH, TBP, E2F4, G6PD, or KIF11. In some embodiments, the essential gene is a gene selected from Table 3 or Table 4.

[0016] In some embodiments, the donor template does not comprise a reporter gene, e.g., a fluorescent reporter gene or an antibiotic resistance gene.

[0017] In some embodiments, the knock-in cassette is a multi-cistronic (e.g., bi-cistronic) knock-in cassette comprising exogenous coding sequences for two or more gene products of interest. In some embodiments, the knock-in cassette comprises a first exogenous coding sequence for a first gene product of interest, a linker (e.g., T2A, P2A, and/or IRES), and a second exogenous coding sequence for a second gene product of interest. In some embodiments, the genome-edited cell comprises knock-in cassettes at one or both alleles of the essential gene. In some embodiments, the genome-edited cell expresses (a) the first and second gene products of interest, and (b) the gene product encoded by the essential gene that is required for survival and/or proliferation of the cell, or a functional variant thereof. In some embodiments, the genome-edited cell expresses (a) the first and second gene products of interest from the same allele of an essential gene, and (b) the gene product encoded by the essential gene that is required for survival and/or proliferation of the cell, or a functional variant thereof. In some embodiments, the genome-edited cell expresses (a) the first and second gene products of interest from different alleles of the essential gene, and (b) the gene product encoded by the essential gene that is required for survival and/or proliferation of the cell, or a functional variant thereof.

[0018] In some embodiments, the method comprises contacting the cell (or the population of cells) with a first non-viral donor template that comprises a first knock-in cassette comprising a first exogenous coding sequence for a first gene product of interest in frame with and downstream (3′) of an exogenous coding sequence or partial coding sequence of the essential gene, and with a second non-viral donor template that comprises a second knock-in cassette comprising a second exogenous coding sequence for a second gene product of interest in frame with and downstream (3′) of an exogenous coding sequence or partial coding sequence of the essential gene. In some embodiments, the genome-edited cell comprises the first knock-in cassette at a first allele of the essential gene and the second knock-in cassette at the second allele of the essential gene. In some embodiments, the genome-edited cell expresses (a) the first and second gene products of interest, and (b) the gene product encoded by the essential gene that is required for survival and/or proliferation of the cell, or a functional variant thereof.

[0019] In some embodiments, the method comprises contacting the cell (or the population of cells) with a first non-viral donor template that comprises a first knock-in cassette comprising a first exogenous coding sequence for a first gene product of interest in frame with and downstream (3′) of an exogenous coding sequence or partial coding sequence of a first essential gene, and with a second non-viral donor template that comprises a second knock-in cassette comprising a second exogenous coding sequence for a second gene product of interest in frame with and downstream (3′) of an exogenous coding sequence or partial coding sequence of a second essential gene. In some embodiments, the genome-edited cell comprises the first knock-in cassette at one or both alleles of the first essential gene and the second knock-in cassette at one or both alleles of the second essential gene. In some embodiments, the genome-edited cell expresses (a) the first and second gene products of interest, and (b) the gene products encoded by the first and second essential genes required for survival and/or proliferation of the cell, or a functional variant thereof.

[0020] In another aspect, the disclosure features a genetically modified cell (e.g., a genetically modified primary cell) comprising a genome with an exogenous coding sequence for a gene product of interest in frame with and downstream (3′) of a coding sequence of an essential gene (e.g., an essential gene that encodes a gene product that is required for survival and/or proliferation of the cell), and wherein at least part of the coding sequence of the essential gene comprises an exogenous coding sequence.

[0021] In some embodiments, the exogenous coding sequence of the essential gene comprises about 2000, 1500, 1000, 750, 500, 400, 300, 200, 100, or 50 base pairs of the coding sequence of the essential gene.

[0022] In some embodiments, the exogenous coding sequence of the essential gene encodes a C-terminal fragment of a protein encoded by the essential gene. In some embodiments, the C-terminal fragment is less than about 500, 250, 150, 125, 100, 75, 50, 25, 20, 15 or 10 amino acids in length. In some embodiments, the C-terminal fragment includes an amino acid sequence that is encoded by a region of the endogenous coding sequence of the essential gene that spans the break.

[0023] In some embodiments, the exogenous coding sequence of the essential gene is less than 100% identical to the corresponding endogenous coding sequence of the essential gene of the cell. In some embodiments, the exogenous coding sequence of the essential gene has been codon optimized relative to the corresponding endogenous coding sequence of the essential gene of the cell to remove a target site of a nuclease. e.g., a Cas. In some embodiments, the nuclease is a Cas (e.g., Cas9, Cas12a, Cas12b, Cas12c, Cas12e, CasX, CasΦ (Cas12j), or a variant thereof), the exogenous coding sequence of the essential gene includes at least one PAM site for the Cas, and the at least one PAM site (or all PAM sites) has been codon optimized or saturated with silent and/or missense mutations.

[0024] In some embodiments, the essential gene is GAPDH, TBP, E2F4, G6PD, or KIF11.

[0025] In some embodiments, the cell's genome comprises a regulatory element that enables expression of the gene product encoded by the essential gene and the gene product of interest as separate gene products, optionally, wherein at least one of the gene products is a protein and the regulatory element enables expression of that protein separate from the other gene product. In some embodiments, the cell's genome comprises an IRES or 2A element located between the coding sequence of the essential gene and the exogenous coding sequence for the gene product of interest.

[0026] In some embodiments, the cell's genome comprises a polyadenylation sequence, and optionally a 3′ UTR sequence, downstream of the exogenous coding sequence for the gene product of interest, and, if a 3′UTR sequence is present, the 3′UTR sequence is positioned 3′ of the exogenous coding sequence and 5′ of the polyadenylation sequence.

[0027] In some embodiments, the cell's genome does not comprise a reporter gene, e.g., a fluorescent reporter gene or an antibiotic resistance gene.

[0028] In another aspect, the disclosure features an engineered cell (e.g., an engineered primary cell) comprising a genomic modification, wherein the genomic modification comprises an insertion of an exogenous non-viral knock-in cassette within an endogenous coding sequence of an essential gene in the cell's genome (e.g., an essential gene that encodes a gene product that is required for survival and/or proliferation of the cell), wherein the knock-in cassette comprises an exogenous coding sequence for a gene product of interest in frame with and downstream (3′) of an exogenous coding sequence or partial coding sequence encoding the gene product of the essential gene, or a functional variant thereof, and wherein the cell expresses the gene product of interest and the gene product encoded by the essential gene that is required for survival and/or proliferation of the cell, or a functional variant thereof, optionally wherein the gene product of interest and the gene product encoded by the essential gene are expressed from the endogenous promoter of the essential gene.

[0029] In some embodiments, the exogenous coding sequence or partial coding sequence encoding the gene product of the essential gene comprises about 2000, 1500, 1000, 750, 500, 400, 300, 200, 100, or 50 base pairs of the coding sequence of the essential gene.

[0030] In some embodiments, wherein the exogenous coding sequence or partial coding sequence encoding the gene product of the essential gene encodes a C-terminal fragment of a protein encoded by the essential gene. In some embodiments, the C-terminal fragment is less than about 500, 250, 150, 125, 100, 75, 50, 25, 20, 15 or 10 amino acids in length. In some embodiments, the C-terminal fragment includes an amino acid sequence that is encoded by a region of the endogenous coding sequence of the essential gene that spans the break.

[0031] In some embodiments, exogenous coding sequence or partial coding sequence encoding the gene product of the essential gene is less than 100% identical to the corresponding endogenous coding sequence of the essential gene of the cell. In some embodiments, the exogenous coding sequence or partial coding sequence encoding the gene product of the essential gene has been codon optimized relative to the corresponding endogenous coding sequence of the essential gene of the cell to remove a target site of a nuclease, e.g., a Cas. In some embodiments, the nuclease is a Cas (e.g., Cas9, Cas12a, Cas12b, Cas12c, Cas12c, CasX, CasΦ (Cas12j), or a variant thereof), the exogenous coding sequence or partial coding sequence encoding the gene product of the essential gene includes at least one PAM site for the Cas, and the at least one PAM site (or all PAM sites) has been codon optimized or saturated with silent and/or missense mutations.

[0032] In some embodiments, the essential gene is GAPDH, TBP, E2F4, G6PD, or KIF11.

[0033] In some embodiments, the cell's genome comprises a regulatory element that enables expression of the gene product encoded by the essential gene and the gene product of interest as separate gene products, optionally, wherein at least one of the gene products is a protein and the regulatory element enables expression of that protein separate from the other gene product. In some embodiments, the cell's genome comprises an IRES or 2A element located between the coding sequence of the essential gene and the exogenous coding sequence for the gene product of interest.

[0034] In some embodiments, the cell's genome comprises a polyadenylation sequence, and optionally a 3′ UTR sequence, downstream of the exogenous coding sequence for the gene product of interest, and, if a 3′UTR sequence is present, the 3′UTR sequence is positioned 3′ of the exogenous coding sequence and 5′ of the polyadenylation sequence.

[0035] In some embodiments, the cell's genome does not comprise a reporter gene, e.g., a fluorescent reporter gene or an antibiotic resistance gene.

[0036] In some embodiments, the knock-in cassette is a multi-cistronic (e.g., bi-cistronic) knock-in cassette comprising exogenous coding sequences for two or more gene products of interest. In some embodiments, the knock-in cassette comprises a first exogenous coding sequence for a first gene product of interest, a linker (e.g., T2A, P2A, and/or IRES), and a second exogenous coding sequence for a second gene product of interest. In some embodiments, the genome-edited cell comprises knock-in cassettes at one or both alleles of the essential gene. In some embodiments, the genome-edited cell expresses (a) the first and second gene products of interest, and (b) the gene product encoded by the essential gene that is required for survival and/or proliferation of the cell, or a functional variant thereof.

[0037] In some embodiments, the engineered cell comprises a first knock-in cassette comprising a first exogenous coding sequence for a first gene product of interest in frame with and downstream (3′) of an exogenous coding sequence or partial coding sequence of the essential gene, and a second knock-in cassette comprising a second exogenous coding sequence for a second gene product of interest in frame with and downstream (3′) of an exogenous coding sequence or partial coding sequence of the essential gene. In some embodiments, the engineered cell comprises the first knock-in cassette and the second knock-in cassette at a first allele of the essential gene, optionally wherein the engineered cell also comprises the first knock-in cassette and the second knock-in cassette at a second allele of the essential gene. In some embodiments, the engineered cell comprises the first knock-in cassette at a first allele of the essential gene and the second knock-in cassette at the second allele of the essential gene. In some embodiments, the engineered cell expresses (a) the first and second gene products of interest, and (b) the gene product encoded by the essential gene that is required for survival and/or proliferation of the cell, or a functional variant thereof.

[0038] In some embodiments, the engineered cell comprises a first knock-in cassette comprising a first exogenous coding sequence for a first gene product of interest in frame with and downstream (3′) of an exogenous coding sequence or partial coding sequence of a first essential gene, and a second knock-in cassette comprising a second exogenous coding sequence for a second gene product of interest in frame with and downstream (3′) of an exogenous coding sequence or partial coding sequence of a second essential gene. In some embodiments, the engineered cell comprises the first knock-in cassette at one or both alleles of the first essential gene and the second knock-in cassette at one or both alleles of the second essential gene. In some embodiments, the genome-edited cell expresses (a) the first and second gene products of interest, and (b) the gene products encoded by the first and second essential genes required for survival and/or proliferation of the cell, or a functional variant thereof.

[0039] In another aspect, the disclosure features any of the cells described herein for use as a medicament and/or for use in the treatment of a disease, disorder or condition, e.g., a disease, disorder or condition described herein, e.g., a cancer, e.g., a cancer described herein.

[0040] In another aspect, the disclosure features a cell, or a population of cells, produced by any of the methods described herein, or progeny thereof.

[0041] In another aspect, the disclosure features a system for editing the genome of a cell, e.g., a primary cell (or a cell in a population of cells, e.g., a primary cell in a population of primary cells), the system comprising the cell (or the population of cells), a nuclease that causes a break within an endogenous coding sequence of an essential gene of the cell (e.g., an essential gene that encodes a gene product that is required for survival and/or proliferation of the cell), and a non-viral donor template that comprises a knock-in cassette comprising an exogenous coding sequence for a gene product of interest in frame with and downstream (3′) of an exogenous coding sequence or partial coding sequence of the essential gene. In some embodiments, the system does not comprise using an HDR enhancer.

[0042] In some embodiments, after contacting the population of cells with the nuclease and the donor template, at least about 60%, at least about 65%, at least about 70%, at least about 75%, at least about 80%, at least about 85%, at least about 90%, at least about 95%, or more, of the viable cells of the population of cells are genome-edited cells, and/or about 40% or less, about 35% or less, about 30% or less, about 25% or less, about 20% or less, about 15% or less, about 10% or less, or about 5% or less, of the population of cells lacking an integrated knock-in cassette are viable cells. In some embodiments, after contacting the population of cells with the nuclease and the donor template, at least about 80% of the viable cells of the population of cells are genome-edited cells, and about 20% or less of the population of cells lacking an integrated knock-in cassette are viable cells. In some embodiments, after contacting the population of cells with the nuclease and the donor template, at least about 60% of the viable cells of the population of cells are genome-edited cells, and about 40% or less of the population of cells lacking an integrated knock-in cassette are viable cells. In some embodiments, after contacting the population of cells with the nuclease and the donor template, at least about 90% of the viable cells of the population of cells are genome-edited cells, and about 10% or less of the population of cells lacking an integrated knock-in cassette are viable cells. In some embodiments, after contacting the population of cells with the nuclease and the donor template, at least about 95% of the viable cells of the population of cells are genome-edited cells, and about 5% or less of the population of cells lacking an integrated knock-in cassette are viable cells.

[0043] In some embodiments, after contacting the cell or population of cells with the nuclease and the donor template, if the knock-in cassette is not integrated into the genome of the cell by homology-directed repair (HDR) in the correct position or orientation, the cell no longer expresses the gene product encoded by the essential gene, or a functional variant thereof.

[0044] In some embodiments, the break is a double-strand break.

[0045] In some embodiments, the break is located within the last 2000, 1500, 1000, 750, 500, 400, 300, 200, 100, or 50 base pairs of the endogenous coding sequence of the essential gene. In some embodiments, the break is located within the last exon of the essential gene.

[0046] In some embodiments, the nuclease is highly efficient, e.g., capable of editing at least about 60%, at least about 65%, at least about 75%, at least about 80%, at least about 85%, at least about 90%, at least about 95%, or more, of cells contacted with the nuclease. In some embodiments, the nuclease is a zinc finger nuclease (ZFN), a transcription activator-like effector nuclease (TALEN) or a meganuclease. In some embodiments, the nuclease is a CRISPR/Cas nuclease and the method further comprises contacting the cell (or the population of cells) with a guide molecule for the CRISPR/Cas nuclease. In some embodiments, the nuclease is a Cas9 or a Cas12a nuclease, or a variant thereof (e.g., a nuclease comprising the amino acid sequence of any one of SEQ ID NOs: 58-66). In some embodiments, the guide molecule comprises a targeting domain sequence that is complementary to a portion of the endogenous coding sequence of the essential gene. In some embodiments, the guide molecule comprises a targeting domain sequence that differs by no more than 3 nucleotides from a sequence that is complementary to a portion of the endogenous coding sequence of the essential gene. In some embodiments, the guide molecule specifically binds to the portion of the endogenous coding sequence of the essential gene. In some embodiments, the guide molecule does not bind to an endogenous coding sequence of another gene, e.g., a different essential gene. In some embodiments, the guide comprises a nucleotide sequence of any one of SEQ ID NOs: 94-131 and 2250-18850.

[0047] In some embodiments, the donor template is a donor DNA template. In some embodiments, the donor template is a single stranded DNA template. In some embodiments, the donor template is a double stranded DNA template. In some embodiments, the donor template is a circular double stranded DNA template, a circular single stranded DNA template, a linear double stranded DNA template, a linear single-stranded DNA template, or a close-ended linear double stranded DNA template.

[0048] In some embodiments, the donor template comprises homology arms on either side of the knock-in cassette. In some embodiments, the donor template comprises a 5′ homology arm comprising a sequence homologous to a sequence located 5′ of the break in the genome of the cell. In some embodiments, the donor template comprises a 3′ homology arm comprising a sequence homologous to a sequence located 3′ of the break in the genome of the cell. In some embodiments, the donor template comprises a 5′ homology arm comprising a sequence homologous to a sequence located 5′ of the break in the genome of the cell, and the donor template comprises a 3′ homology arm comprising a sequence homologous to a sequence located 3′ of the break in the genome of the cell.

[0049] In some embodiments, the knock-in cassette comprises a regulatory element that enables expression of the gene product encoded by the essential gene and the gene product of interest as separate gene products, optionally, wherein at least one of the gene products is a protein and the regulatory element enables expression of that protein separate from the other gene product. In some embodiments, the knock-in cassette comprises an IRES or 2A element located between the exogenous coding sequence or partial coding sequence of the essential gene and the exogenous coding sequence for the gene product of interest. In some embodiments, the 2A element is a T2A element (e.g., EGRGSLLTCGDVEENPGP), a P2A element (e.g., ATNFSLLKQAGDVEENPGP), a E2A element (e.g., QCTNYALLKLAGDVESNPGP), or an F2A element (e.g., VKQTLNFDLLKLAGDVESNPGP). In some embodiments, the knock-in cassette further comprises a sequence encoding a linker peptide upstream of the 2A element. In some embodiments, the linker peptide comprises the amino acid sequence GSG.

[0050] In some embodiments, the knock-in cassette comprises a polyadenylation sequence, and optionally a 3′ UTR sequence, downstream of the exogenous coding sequence for the gene product of interest, and, if a 3′UTR sequence is present, the 3′UTR sequence is positioned 3′ of the exogenous coding sequence and 5′ of the polyadenylation sequence.

[0051] In some embodiments, the exogenous partial coding sequence of the essential gene in the knock-in cassette encodes a C-terminal fragment of a protein encoded by the essential gene. In some embodiments, the C-terminal fragment is less than about 500, 250, 150, 125, 100, 75, 50, 25, 20, 15 or 10 amino acids in length. In some embodiments, the C-terminal fragment includes an amino acid sequence that is encoded by a region of the endogenous coding sequence of the essential gene that spans the break.

[0052] In some embodiments, the exogenous coding sequence or partial coding sequence of the essential gene in the knock-in cassette is less than 100% identical to the corresponding endogenous coding sequence of the essential gene of the cell. In some embodiments, the exogenous coding sequence or partial coding sequence of the essential gene in the knock-in cassette has been codon optimized relative to the corresponding endogenous coding sequence of the essential gene of the cell to remove a target site of the nuclease, to reduce the likelihood of homologous recombination after integration of the knock-in cassette into the genome of the cell, or to increase expression of the gene product of the essential gene and/or the gene product of interest after integration of the knock-in cassette into the genome of the cell.

[0053] In some embodiments, the nuclease is a Cas (e.g., Cas9, Cas12a, Cas12b, Cas12c, Cas12e, CasX, CasΦ (Cas12j), or a variant thereof), the exogenous coding sequence or partial coding sequence of the essential gene in the knock-in cassette includes at least one PAM site for the Cas, and the at least one PAM site (or all PAM sites) has been codon optimized or saturated with silent and/or missense mutations.

[0054] In some embodiments, the essential gene is GAPDH, TBP, E2F4, G6PD, or KIF11.

[0055] In some embodiments, the donor template does not comprise a reporter gene, e.g., a fluorescent reporter gene or an antibiotic resistance gene.

[0056] In some embodiments, the knock-in cassette is a multi-cistronic (e.g., bi-cistronic) knock-in cassette comprising exogenous coding sequences for two or more gene products of interest. In some embodiments, the knock-in cassette comprises a first exogenous coding sequence for a first gene product of interest, a linker (e.g., T2A, P2A, and/or IRES), and a second exogenous coding sequence for a second gene product of interest. In some embodiments, after contacting the population of cells with the nuclease and the donor template, the genome-edited cell comprises knock-in cassettes at one or both alleles of the essential gene. In some embodiments, the genome-edited cell expresses (a) the first and second gene products of interest, and (b) the gene product encoded by the essential gene that is required for survival and/or proliferation of the cell, or a functional variant thereof.

[0057] In some embodiments, the system comprises a first non-viral donor template that comprises a first knock-in cassette comprising a first exogenous coding sequence for a first gene product of interest in frame with and downstream (3′) of an exogenous coding sequence or partial coding sequence of the essential gene, and a second non-viral donor template that comprises a second knock-in cassette comprising a second exogenous coding sequence for a second gene product of interest in frame with and downstream (3′) of an exogenous coding sequence or partial coding sequence of the essential gene. In some embodiments, after contacting the population of cells with the nuclease and the donor templates, the genome-edited cell comprises the first knock-in cassette at a first allele of the essential gene and the second knock-in cassette at the second allele of the essential gene. In some embodiments, the genome-edited cell expresses (a) the first and second gene products of interest, and (b) the gene product encoded by the essential gene that is required for survival and/or proliferation of the cell, or a functional variant thereof.

[0058] In some embodiments, the system comprises a first non-viral donor template that comprises a first knock-in cassette comprising a first exogenous coding sequence for a first gene product of interest in frame with and downstream (3′) of an exogenous coding sequence or partial coding sequence of a first essential gene, and a second non-viral donor template that comprises a second knock-in cassette comprising a second exogenous coding sequence for a second gene product of interest in frame with and downstream (3′) of an exogenous coding sequence or partial coding sequence of a second essential gene. In some embodiments, after contacting the population of cells with the nuclease and the donor templates, the genome-edited cell comprises the first knock-in cassette at one or both alleles of the first essential gene and the second knock-in cassette at one or both alleles of the second essential gene. In some embodiments, the genome-edited cell expresses (a) the first and second gene products of interest, and (b) the gene products encoded by the first and second essential genes required for survival and/or proliferation of the cell, or a functional variant thereof.

[0059] In another aspect, the disclosure features a non-viral donor template comprising a knock-in cassette with an exogenous coding sequence for a gene product of interest in frame with and downstream (3′) of an exogenous coding sequence or partial coding sequence of an essential gene (e.g., an essential gene that encodes a gene product that is required for survival and/or proliferation of the cell).

[0060] In some embodiments, the donor template is for use in editing the genome of a cell by homology-directed repair (HDR).

[0061] In some embodiments, the donor template is a donor DNA template. In some embodiments, the donor template is a single stranded DNA template. In some embodiments, the donor template is a double stranded DNA template. In some embodiments, the donor template is a circular double stranded DNA template, a circular single stranded DNA template, a linear double stranded DNA template, a linear single-stranded DNA template, or a close-ended linear double stranded DNA template.

[0062] In some embodiments, the donor template comprises homology arms on either side of the knock-in cassette. In some embodiments, the donor template comprises a 5′ homology arm comprising a sequence homologous to a sequence located 5′ of a target site in the genome of the cell. In some embodiments, the donor template comprises a 3′ homology arm comprising a sequence homologous to a sequence located 3′ of a target site in the genome of the cell. In some embodiments, the donor template comprises a 5′ homology arm comprising a sequence homologous to a sequence located 5′ of a target site in the genome of the cell, and the donor template comprises a 3′ homology arm comprising a sequence homologous to a sequence located 3′ of a target site in the genome of the cell.

[0063] In some embodiments, the knock-in cassette comprises a regulatory element that enables expression of the gene product encoded by the essential gene and the gene product of interest as separate gene products, optionally, wherein at least one of the gene products is a protein and the regulatory element enables expression of that protein separate from the other gene product. In some embodiments, the knock-in cassette comprises an IRES or 2A element located between the exogenous coding sequence or partial coding sequence of the essential gene and the exogenous coding sequence for the gene product of interest. In some embodiments, the 2A element is a T2A element (e.g., EGRGSLLTCGDVEENPGP), a P2A element (e.g., ATNFSLLKQAGDVEENPGP), a E2A element (e.g., QCTNYALLKLAGDVESNPGP), or an F2A element (e.g., VKQTLNFDLLKLAGDVESNPGP). In some embodiments, the knock-in cassette further comprises a sequence encoding a linker peptide upstream of the 2A element. In some embodiments, the linker peptide comprises the amino acid sequence GSG.

[0064] In some embodiments, the knock-in cassette comprises a polyadenylation sequence, and optionally a 3′ UTR sequence, downstream of the exogenous coding sequence for the gene product of interest, and, if a 3′UTR sequence is present, the 3′UTR sequence is positioned 3′ of the exogenous coding sequence and 5′ of the polyadenylation sequence.

[0065] In some embodiments, the exogenous partial coding sequence of the essential gene in the knock-in cassette encodes a C-terminal fragment of a protein encoded by the essential gene. In some embodiments, the C-terminal fragment is less than about 500, 250, 150, 125, 100, 75, 50, 25, 20, 15 or 10 amino acids in length. In some embodiments, the C-terminal fragment includes an amino acid sequence that is encoded by a region of the endogenous coding sequence of the essential gene.

[0066] In some embodiments, the exogenous coding sequence or partial coding sequence of the essential gene in the knock-in cassette is less than 100% identical to the corresponding endogenous coding sequence of the essential gene of the cell. In some embodiments, the exogenous coding sequence or partial coding sequence of the essential gene in the knock-in cassette has been codon optimized relative to the corresponding endogenous coding sequence of the essential gene of the cell to remove a target site of the nuclease, to reduce the likelihood of homologous recombination after integration of the knock-in cassette into the genome of the cell, or to increase expression of the gene product of the essential gene and/or the gene product of interest after integration of the knock-in cassette into the genome of the cell.

[0067] In some embodiments, the nuclease is a Cas (e.g., Cas9, Cas12a, Cas12b, Cas12c, Cas12e, CasX, CasΦ (Cas12j), or a variant thereof), the exogenous coding sequence or partial coding sequence of the essential gene in the knock-in cassette includes at least one PAM site for the Cas, and the at least one PAM site (or all PAM sites) has been codon optimized or saturated with silent and/or missense mutations.

[0068] In some embodiments, the essential gene is GAPDH, TBP, E2F4, G6PD, or KIF11.

[0069] In some embodiments, the donor template does not comprise a reporter gene, e.g., a fluorescent reporter gene or an antibiotic resistance gene.

[0070] In one aspect, the disclosure features a method of producing a population of modified cells (e.g., population of modified primary cells), the method comprising contacting cells with: (i) a nuclease that causes a break within an endogenous coding sequence of an essential gene in a plurality of the cells (e.g., an essential gene that encodes a gene product that is required for survival and/or proliferation of the cells), and (ii) a non-viral donor template that comprises a knock-in cassette comprising an exogenous coding sequence for a gene product of interest in frame with and downstream (3′) of an exogenous coding sequence or partial coding sequence of the essential gene, wherein the knock-in cassette is integrated into the genome of a plurality of the cells by homology-directed repair (HDR) of the break, resulting in genome-edited cells that expresses: (a) the gene product of interest, and (b) the gene product encoded by the essential gene that is required for survival and/or proliferation of the plurality of cells, or a functional variant thereof, and wherein following the contacting step, at least about 60%, at least about 65%, at least about 70%, at least about 75%, at least about 80%, at least about 85%, at least about 90%, at least about 95%, or more, of the viable cells are genome-edited cells, and/or about 40% or less, about 35% or less, about 30% or less, about 25% or less, about 20% or less, about 15% or less, about 10% or less, or about 5% or less, of the cells lacking an integrated knock-in cassette are viable cells, thereby producing a population of modified cells. In some embodiments, following the contacting step, at least about 80% of the viable cells are genome-edited cells, and about 20% or less of the cells lacking an integrated knock-in cassette are viable cells. In some embodiments, following the contacting step, at least about 60% of the viable cells are genome-edited cells, and about 40% or less of the cells lacking an integrated knock-in cassette are viable cells. In some embodiments, following the contacting step, at least about 90% of the viable cells are genome-edited cells, and about 10% or less of the cells lacking an integrated knock-in cassette are viable cells. In some embodiments, following the contacting step, at least about 95% of the viable cells are genome-edited cells, and about 5% or less of cells lacking an integrated knock-in cassette are viable cells. In some embodiments, the method does not comprise using an HDR enhancer.

[0071] In some embodiments, if the knock-in cassette is not integrated into the genome of the cell by homology-directed repair (HDR) in the correct position or orientation, the cell no longer expresses the gene product encoded by the essential gene, or a functional variant thereof.

[0072] In some embodiments, the break is a double-strand break.

[0073] In some embodiments, the break is located within the last 2000, 1500, 1000, 750, 500, 400, 300, 200, 100, or 50 base pairs of the endogenous coding sequence of the essential gene. In some embodiments, the break is located within the last exon of the essential gene.

[0074] In some embodiments, the nuclease is highly efficient, e.g., capable of editing at least about 60%, at least about 65%, at least about 75%, at least about 80%, at least about 85%, at least about 90%, at least about 95%, or more, of cells contacted with the nuclease. In some embodiments, the nuclease is a zinc finger nuclease (ZFN), a transcription activator-like effector nuclease (TALEN) or a meganuclease. In some embodiments, the nuclease is a CRISPR/Cas nuclease and the method further comprises contacting the cell (or the population of cells) with a guide molecule for the CRISPR/Cas nuclease. In some embodiments, the nuclease is a Cas9 or a Cas12a nuclease, or a variant thereof (e.g., a nuclease comprising the amino acid sequence of any one of SEQ ID NOs: 58-66). In some embodiments, the guide molecule comprises a targeting domain sequence that is complementary to a portion of the endogenous coding sequence of the essential gene. In some embodiments, the guide molecule comprises a targeting domain sequence that differs by no more than 3 nucleotides from a sequence that is complementary to a portion of the endogenous coding sequence of the essential gene. In some embodiments, the guide molecule specifically binds to the portion of the endogenous coding sequence of the essential gene. In some embodiments, the guide molecule does not bind to an endogenous coding sequence of another gene, e.g., a different essential gene. In some embodiments, the guide comprises a nucleotide sequence of any one of SEQ ID NOs: 94-131 and 2250-18850.

[0075] In some embodiments, the donor template is a donor DNA template. In some embodiments, the donor template is a single stranded DNA template. In some embodiments, the donor template is a double stranded DNA template. In some embodiments, the donor template is a circular double stranded DNA template, a circular single stranded DNA template, a linear double stranded DNA template, a linear single-stranded DNA template, or a close-ended linear double stranded DNA template.

[0076] In some embodiments, the donor template comprises homology arms on either side of the knock-in cassette. In some embodiments, the donor template comprises a 5′ homology arm comprising a sequence homologous to a sequence located 5′ of the break in the genome of the cell. In some embodiments, the donor template comprises a 3′ homology arm comprising a sequence homologous to a sequence located 3′ of the break in the genome of the cell. In some embodiments, the donor template comprises a 5′ homology arm comprising a sequence homologous to a sequence located 5′ of the break in the genome of the cell, and the donor template comprises a 3′ homology arm comprising a sequence homologous to a sequence located 3′ of the break in the genome of the cell.

[0077] In some embodiments, the knock-in cassette comprises a regulatory element that enables expression of the gene product encoded by the essential gene and the gene product of interest as separate gene products, optionally, wherein at least one of the gene products is a protein and the regulatory element enables expression of that protein separate from the other gene product. In some embodiments, the knock-in cassette comprises an IRES or 2A element located between the exogenous coding sequence or partial coding sequence of the essential gene and the exogenous coding sequence for the gene product of interest. In some embodiments, the 2A element is a T2A element (e.g., EGRGSLLTCGDVEENPGP), a P2A element (e.g., ATNFSLLKQAGDVEENPGP), a E2A element (e.g., QCTNYALLKLAGDVESNPGP), or an F2A element (e.g., VKQTLNFDLLKLAGDVESNPGP). In some embodiments, the knock-in cassette further comprises a sequence encoding a linker peptide upstream of the 2A element. In some embodiments, the linker peptide comprises the amino acid sequence GSG.

[0078] In some embodiments, the knock-in cassette comprises a polyadenylation sequence, and optionally a 3′ UTR sequence, downstream of the exogenous coding sequence for the gene product of interest, and, if a 3′UTR sequence is present, the 3′UTR sequence is positioned 3′ of the exogenous coding sequence and 5′ of the polyadenylation sequence.

[0079] In some embodiments, the exogenous partial coding sequence of the essential gene in the knock-in cassette encodes a C-terminal fragment of a protein encoded by the essential gene. In some embodiments, the C-terminal fragment is less than about 500, 250, 150, 125, 100, 75, 50, 25, 20, 15 or 10 amino acids in length. In some embodiments, the C-terminal fragment includes an amino acid sequence that is encoded by a region of the endogenous coding sequence of the essential gene that spans the break.

[0080] In some embodiments, the exogenous coding sequence or partial coding sequence of the essential gene in the knock-in cassette is less than 100% identical to the corresponding endogenous coding sequence of the essential gene of the cell. In some embodiments, the exogenous coding sequence or partial coding sequence of the essential gene in the knock-in cassette has been codon optimized relative to the corresponding endogenous coding sequence of the essential gene of the cell to remove a target site of the nuclease, to reduce the likelihood of homologous recombination after integration of the knock-in cassette into the genome of the cell, or to increase expression of the gene product of the essential gene and/or the gene product of interest after integration of the knock-in cassette into the genome of the cell.

[0081] In some embodiments, the nuclease is a Cas (e.g., Cas9, Cas12a, Cas12b, Cas12c, Cas12e, CasX, CasΦ (Cas12j), or a variant thereof), the exogenous coding sequence or partial coding sequence of the essential gene in the knock-in cassette includes at least one PAM site for the Cas, and the at least one PAM site (or all PAM sites) has been codon optimized or saturated with silent and/or missense mutations.

[0082] In some embodiments, the essential gene is GAPDH, TBP, E2F4, G6PD, or KIF11.

[0083] In some embodiments, the donor template does not comprise a reporter gene, e.g., a fluorescent reporter gene or an antibiotic resistance gene.

[0084] In some embodiments, the knock-in cassette is a multi-cistronic (e.g., bi-cistronic) knock-in cassette comprising exogenous coding sequences for two or more gene products of interest. In some embodiments, the knock-in cassette comprises a first exogenous coding sequence for a first gene product of interest, a linker (e.g., T2A, P2A, and/or IRES), and a second exogenous coding sequence for a second gene product of interest. In some embodiments, the genome-edited cells comprise knock-in cassettes at one or both alleles of the essential gene. In some embodiments, the genome-edited cells expresses (a) the first and second gene products of interest, and (b) the gene product encoded by the essential gene that is required for survival and/or proliferation of the cells, or a functional variant thereof.

[0085] In some embodiments, the method comprises contacting the cells (or the population of cells) with a first non-viral donor template that comprises a first knock-in cassette comprising a first exogenous coding sequence for a first gene product of interest in frame with and downstream (3′) of an exogenous coding sequence or partial coding sequence of the essential gene, and with a second non-viral donor template that comprises a second knock-in cassette comprising a second exogenous coding sequence for a second gene product of interest in frame with and downstream (3′) of an exogenous coding sequence or partial coding sequence of the essential gene. In some embodiments, the genome-edited cells comprise the first knock-in cassette at a first allele of the essential gene and the second knock-in cassette at the second allele of the essential gene. In some embodiments, the genome-edited cells expresses (a) the first and second gene products of interest, and (b) the gene product encoded by the essential gene that is required for survival and/or proliferation of the cells, or a functional variant thereof.

[0086] In some embodiments, the method comprises contacting the cells (or the population of cells) with a first non-viral donor template that comprises a first knock-in cassette comprising a first exogenous coding sequence for a first gene product of interest in frame with and downstream (3′) of an exogenous coding sequence or partial coding sequence of a first essential gene, and with a second non-viral donor template that comprises a second knock-in cassette comprising a second exogenous coding sequence for a second gene product of interest in frame with and downstream (3′) of an exogenous coding sequence or partial coding sequence of a second essential gene. In some embodiments, the genome-edited cells comprise the first knock-in cassette at one or both alleles of the first essential gene and the second knock-in cassette at one or both alleles of the second essential gene. In some embodiments, the genome-edited cells expresses (a) the first and second gene products of interest, and (b) the gene products encoded by the first and second essential genes required for survival and/or proliferation of the cells, or a functional variant thereof.

[0087] In another aspect, the disclosure features a method of selecting and/or identifying a cell (e.g., a primary cell) comprising a knock-in of a gene product of interest within an endogenous coding sequence of an essential gene in the cell, the method comprising contacting a population of cells (e.g., primary cells) with: (i) a nuclease that causes a break within an endogenous coding sequence of an essential gene in a plurality of the cells (e.g., an essential gene that encodes a gene product that is required for survival and/or proliferation of the cells), and (ii) a non-viral donor template that comprises a knock-in cassette comprising an exogenous coding sequence for a gene product of interest in frame with and downstream (3′) of an exogenous coding sequence or partial coding sequence of the essential gene, wherein the knock-in cassette is integrated into the genome of a plurality of the cells by homology-directed repair (HDR) of the break, and identifying a genome-edited cell within the population of cells that expresses: (a) the gene product of interest, and (b) the gene product encoded by the essential gene that is required for survival and/or proliferation of the cell, or a functional variant thereof. In some embodiments, the method does not comprise using an HDR enhancer.

[0088] In some embodiments, following the contacting step, at least about 60%, at least about 65%, at least about 70%, at least about 75%, at least about 80%, at least about 85%, at least about 90%, at least about 95%, or more, of the viable cells of the population of cells are genome-edited cells, and/or about 40% or less, about 35% or less, about 30% or less, about 25% or less, about 20% or less, about 15% or less, about 10% or less, or about 5% or less, of the population of cells lacking an integrated knock-in cassette are viable cells. In some embodiments, following the contacting step, at least about 80% of the viable cells of the population of cells are genome-edited cells, and about 20% or less of the population of cells lacking an integrated knock-in cassette are viable cells. In some embodiments, following the contacting step, at least about 60% of the viable cells of the population of cells are genome-edited cells, and about 40% or less of the population of cells lacking an integrated knock-in cassette are viable cells. In some embodiments, following the contacting step, at least about 90% of the viable cells of the population of cells are genome-edited cells, and about 10% or less of the population of cells lacking an integrated knock-in cassette are viable cells. In some embodiments, following the contacting step, at least about 95% of the viable cells of the population of cells are genome-edited cells, and about 5% or less of the population of cells lacking an integrated knock-in cassette are viable cells.

[0089] In some embodiments, if the knock-in cassette is not integrated into the genome of the cell by homology-directed repair (HDR) in the correct position or orientation, the cell no longer expresses the gene product encoded by the essential gene, or a functional variant thereof.

[0090] In some embodiments, the break is a double-strand break.

[0091] In some embodiments, the break is located within the last 2000, 1500, 1000, 750, 500, 400, 300, 200, 100, or 50 base pairs of the endogenous coding sequence of the essential gene. In some embodiments, the break is located within the last exon of the essential gene.

[0092] In some embodiments, the nuclease is highly efficient, e.g., capable of editing at least about 60%, at least about 65%, at least about 75%, at least about 80%, at least about 85%, at least about 90%, at least about 95%, or more, of cells contacted with the nuclease. In some embodiments, the nuclease is a zinc finger nuclease (ZFN), a transcription activator-like effector nuclease (TALEN) or a meganuclease. In some embodiments, the nuclease is a CRISPR/Cas nuclease and the method further comprises contacting the cell (or the population of cells) with a guide molecule for the CRISPR/Cas nuclease. In some embodiments, the nuclease is a Cas9 or a Cas12a nuclease, or a variant thereof (e.g., a nuclease comprising the amino acid sequence of any one of SEQ ID NOs: 58-66). In some embodiments, the guide molecule comprises a targeting domain sequence that is complementary to a portion of the endogenous coding sequence of the essential gene. In some embodiments, the guide molecule comprises a targeting domain sequence that differs by no more than 3 nucleotides from a sequence that is complementary to a portion of the endogenous coding sequence of the essential gene. In some embodiments, the guide molecule specifically binds to the portion of the endogenous coding sequence of the essential gene. In some embodiments, the guide molecule does not bind to an endogenous coding sequence of another gene, e.g., a different essential gene. In some embodiments, the guide comprises a nucleotide sequence of any one of SEQ ID NOs: 94-131 and 2250-18850.

[0093] In some embodiments, the donor template is a donor DNA template. In some embodiments, the donor template is a single stranded DNA template. In some embodiments, the donor template is a double stranded DNA template. In some embodiments, the donor template is a circular double stranded DNA template, a circular single stranded DNA template, a linear double stranded DNA template, a linear single-stranded DNA template, or a close-ended linear double stranded DNA template.

[0094] In some embodiments, the donor template comprises homology arms on either side of the knock-in cassette. In some embodiments, the donor template comprises a 5′ homology arm comprising a sequence homologous to a sequence located 5′ of the break in the genome of the cell. In some embodiments, the donor template comprises a 3′ homology arm comprising a sequence homologous to a sequence located 3′ of the break in the genome of the cell. In some embodiments, the donor template comprises a 5′ homology arm comprising a sequence homologous to a sequence located 5′ of the break in the genome of the cell, and the donor template comprises a 3′ homology arm comprising a sequence homologous to a sequence located 3′ of the break in the genome of the cell.

[0095] In some embodiments, the knock-in cassette comprises a regulatory element that enables expression of the gene product encoded by the essential gene and the gene product of interest as separate gene products, optionally, wherein at least one of the gene products is a protein and the regulatory element enables expression of that protein separate from the other gene product. In some embodiments, the knock-in cassette comprises an IRES or 2A element located between the exogenous coding sequence or partial coding sequence of the essential gene and the exogenous coding sequence for the gene product of interest. In some embodiments, the 2A element is a T2A element (e.g., EGRGSLLTCGDVEENPGP), a P2A element (e.g., ATNFSLLKQAGDVEENPGP), a E2A element (e.g., QCTNYALLKLAGDVESNPGP), or an F2A element (e.g., VKQTLNFDLLKLAGDVESNPGP). In some embodiments, the knock-in cassette further comprises a sequence encoding a linker peptide upstream of the 2A element. In some embodiments, the linker peptide comprises the amino acid sequence GSG.

[0096] In some embodiments, the knock-in cassette comprises a polyadenylation sequence, and optionally a 3′ UTR sequence, downstream of the exogenous coding sequence for the gene product of interest, and, if a 3′UTR sequence is present, the 3′UTR sequence is positioned 3′ of the exogenous coding sequence and 5′ of the polyadenylation sequence.

[0097] In some embodiments, the exogenous partial coding sequence of the essential gene in the knock-in cassette encodes a C-terminal fragment of a protein encoded by the essential gene. In some embodiments, the C-terminal fragment is less than about 500, 250, 150, 125, 100, 75, 50, 25, 20, 15 or 10 amino acids in length. In some embodiments, the C-terminal fragment includes an amino acid sequence that is encoded by a region of the endogenous coding sequence of the essential gene that spans the break.

[0098] In some embodiments, the exogenous coding sequence or partial coding sequence of the essential gene in the knock-in cassette is less than 100% identical to the corresponding endogenous coding sequence of the essential gene of the cell. In some embodiments, the exogenous coding sequence or partial coding sequence of the essential gene in the knock-in cassette has been codon optimized relative to the corresponding endogenous coding sequence of the essential gene of the cell to remove a target site of the nuclease, to reduce the likelihood of homologous recombination after integration of the knock-in cassette into the genome of the cell, or to increase expression of the gene product of the essential gene and/or the gene product of interest after integration of the knock-in cassette into the genome of the cell.

[0099] In some embodiments, the nuclease is a Cas (e.g., Cas9, Cas12a, Cas12b, Cas12c, Cas12e, CasX, CasΦ (Cas12j), or a variant thereof), the exogenous coding sequence or partial coding sequence of the essential gene in the knock-in cassette includes at least one PAM site for the Cas, and the at least one PAM site (or all PAM sites) has been codon optimized or saturated with silent and/or missense mutations.

[0100] In some embodiments, the essential gene is GAPDH, TBP, E2F4, G6PD, or KIF11.

[0101] In some embodiments, the donor template does not comprise a reporter gene, e.g., a fluorescent reporter gene or an antibiotic resistance gene.

[0102] In some embodiments, the knock-in cassette is a multi-cistronic (e.g., bi-cistronic) knock-in cassette comprising exogenous coding sequences for two or more gene products of interest. In some embodiments, the knock-in cassette comprises a first exogenous coding sequence for a first gene product of interest, a linker (e.g., T2A, P2A, and/or IRES), and a second exogenous coding sequence for a second gene product of interest. In some embodiments, the genome-edited cell comprises knock-in cassettes at one or both alleles of the essential gene. In some embodiments, the genome-edited cell expresses (a) the first and second gene products of interest, and (b) the gene product encoded by the essential gene that is required for survival and/or proliferation of the cell, or a functional variant thereof.

[0103] In some embodiments, the method comprises contacting the population of cells with a first non-viral donor template that comprises a first knock-in cassette comprising a first exogenous coding sequence for a first gene product of interest in frame with and downstream (3′) of an exogenous coding sequence or partial coding sequence of the essential gene, and with a second non-viral donor template that comprises a second knock-in cassette comprising a second exogenous coding sequence for a second gene product of interest in frame with and downstream (3′) of an exogenous coding sequence or partial coding sequence of the essential gene. In some embodiments, the genome-edited cells comprises the first knock-in cassette at a first allele of the essential gene and the second knock-in cassette at the second allele of the essential gene. In some embodiments, the genome-edited cells expresses (a) the first and second gene products of interest, and (b) the gene product encoded by the essential gene that is required for survival and/or proliferation of the cell, or a functional variant thereof.

[0104] In some embodiments, the method comprises contacting the population of cells with a first non-viral donor template that comprises a first knock-in cassette comprising a first exogenous coding sequence for a first gene product of interest in frame with and downstream (3′) of an exogenous coding sequence or partial coding sequence of a first essential gene, and with a second non-viral donor template that comprises a second knock-in cassette comprising a second exogenous coding sequence for a second gene product of interest in frame with and downstream (3′) of an exogenous coding sequence or partial coding sequence of a second essential gene. In some embodiments, the genome-edited cells comprises the first knock-in cassette at one or both alleles of the first essential gene and the second knock-in cassette at one or both alleles of the second essential gene. In some embodiments, the genome-edited cell expresses (a) the first and second gene products of interest, and (b) the gene products encoded by the first and second essential genes required for survival and/or proliferation of the cell, or a functional variant thereof.

### BRIEF DESCRIPTION OF THE DRAWING

[0105] The teachings described herein will be more fully understood from the following description of various exemplary embodiments, when read together with the accompanying drawing. It should be understood that the drawing described below is for illustration purposes only and is not intended to limit the scope of the present teachings in any way.

[0106] FIG. 1 shows the locations on the GAPDH gene where exemplary AsCpf1 (AsCas12a) guide RNAs bind, and the results of screening the exemplary guide RNAs that target the GAPDH gene three days after transfection. Results are from gDNA from living cells.

[0107] FIG. 2 shows results of screening the exemplary AsCpf1 (AsCas12a) guide RNAs that target the GAPDH gene, three days after transfection. Results are from gDNA from living cells.

[0108] FIG. 3A shows an exemplary integration strategy that targets an essential gene according to certain embodiments of the present disclosure. In particular embodiments, introducing a double strand break using CRISPR gene editing (e.g., by Cas12a, Cas9, Cas12b, Cas12c. Cas12c, CasX, or CasΦ (Cas12j), or a variant thereof, e.g., a variant with a high editing efficiency, e.g., capable of editing about 60% to 100% of cells in a population of cells) within a terminal exon (e.g., within about 500 bp upstream (5′) of the stop codon of the essential gene) and administering a donor plasmid with homology arms designed to mediate homology directed repair (HDR) at the cleavage site, results in a population of viable cells carrying a cargo of interest integrated at the essential gene locus. Those cells that were edited by the CRISPR nuclease, but failed to undergo integration of the cargo at the essential gene locus, do not survive.

[0109] FIG. 3B shows an exemplary integration strategy that targets the GAPDH gene according to certain embodiments of the present disclosure. Although FIG. 3B shows a strategy wherein the GAPDH gene is modified in an induced pluripotent stem cell (iPSC), this strategy can be applied to a variety of cell types, including primary cells, e.g., T cells, NK cells, stem cells, iPSCs. and cells differentiated from iPSCs. e.g., iPSC-derived T cells or NK cells for treating cancer.

[0110] FIG. 3C shows an exemplary integration strategy that targets the GAPDH gene according to certain embodiments of the present disclosure. The diagram shows that the only cells that should survive over time are those cells that underwent targeted integration of a cassette that restores the GAPDH locus and includes a cargo of interest, as well as unedited cells. The population of unedited cells following CRISPR editing should be small if the nuclease and guide RNA are highly effective at cleaving the essential gene target site and introduce indels that significantly reduce the function of the essential gene product.

[0111] FIG. 3D shows an exemplary integration strategy that targets an essential gene according to certain embodiments of the present disclosure. In particular embodiments, introducing a double strand break using CRISPR gene editing (e.g., by Cas12a, Cas9, Cas12b, Cas12c, Cas12e, CasX, or CasΦ (Cas12j), or a variant thereof, e.g., a variant with a high editing efficiency, e.g., capable of editing about 60% to 100% of cells in a population of cells) to target a 5′ exon (e.g., within about 500 bp downstream (3′) of a start codon of the essential gene) and administering a donor plasmid with homology arms designed to mediate homology directed repair (HDR) at the cleavage site, results in a population of viable cells carrying a cargo of interest integrated at the essential gene locus. Those cells that were edited by the CRISPR nuclease, but failed to undergo integration of the cargo at the essential gene locus, do not survive.

[0112] FIG. 4A is a schematic representation of an exemplary experiment to test usage of various donor templates including linear double-stranded DNA (dsDNA), single-stranded DNA (ssDNA), and AAV6 single-stranded DNA template (AAV) in knock-in of an exemplary cargo (GFP) at an essential gene. In this exemplary method, donor templates and RNPs comprising RSQ22337 and Cas12a (SEQ ID NO: 62) are electroporated into T cells and cells are examined by flow cytometry and next-gen sequencing (NGS) at 7 days post-electroporation.

[0113] FIG. 4B shows results from a GFP knock-in experiment as depicted in FIG. 4A. The X axis depicts the donor template type (linear double-stranded DNA (dsDNA), linear single-stranded DNA (ssDNA), AAV6 single-stranded DNA (AAV), or mock-treated T cells (Cells only), while the Y axis depicts the percentage of GFP+ cells as measured by flow cytometry. Technical replicates from N=3 unique samples were performed for each donor template type and the mean is depicted with a horizontal line. No significant difference in the percentage of GFP+ cells as measured by flow cytometry was observed between dsDNA, ssDNA, and AAV6 templates. All template types demonstrated significantly (*** p<0.001) greater percentage of GFP+ cells as measured by flow cytometry as compared to mock-treated cell (“Cells only”). Significance testing was conducted by one-way ANOVA followed by Bonferroni's multiple comparisons test.

[0114] FIG. 4C shows results from a GFP knock-in experiment as depicted in FIG. 4A. The X axis depicts the donor template type (linear double-stranded DNA (dsDNA), linear single-stranded DNA (ssDNA), AAV6 single-stranded DNA (AAV), or mock-treated T cells (Mock)), while the Y axis depicts the percentage of viable cells as measured by flow cytometry. Technical replicates from N=3 unique samples were performed for each donor template type and the mean is depicted with a horizontal line. No significant difference in the percentage of viable cells as measured by flow cytometry was observed between dsDNA, ssDNA, or AAV6 and mock-treated cells. Significance testing was conducted by one-way ANOVA followed by Bonferroni's multiple comparisons test.

[0115] FIG. 4D shows results from a GFP knock-in experiment as depicted in FIG. 4A. The X axis depicts the donor template type (linear double-stranded DNA (dsDNA), linear single-stranded DNA (ssDNA), AAV6 single-stranded DNA (AAV), or mock-treated T cells (Mock)), while the Y axis depicts the fold expansion of cells after 7 days. Technical replicates from N=3 unique samples were performed for each donor template type and the mean is depicted with a horizontal line. No significant difference in the fold expansion was observed between dsDNA, ssDNA, or AAV6 and mock-treated cells. Significance testing was conducted by one-way ANOVA followed by Bonferroni's multiple comparisons test.

[0116] FIG. 5A shows representative flow cytometry plots showing insertion rates for GFP using different DNA donor template formats in human primary T cells.

[0117] FIG. 5B shows efficiency of GFP knock-in using different DNA donor templates in human primary T cells.

[0118] FIG. 5C depicts an overview of long-read sequencing to assess editing outcomes of knock-in on all alleles with various cargos and donor templates at single base resolution in T cells.

[0119] FIG. 5D shows efficiency of perfect insertion in all alleles for GFP knock-in over all alleles for different DNA donor template formats in human primary T cells as measured by long-read sequencing after 7 days.

[0120] FIG. 5E shows efficiency of GFP knock-in with and without an HDR enhancer small molecule for different DNA donor templates in human primary T cells.

[0121] FIG. 6 depicts exemplary flow cytometry plots showing insertion rates for CD19 CAR and EGFR CAR in human primary T cells compared to mock-transfected T cells.

[0122] FIG. 7 shows representative flow cytometry plots depicting MHC-1 expression (x-axis) and HLA-E expression (y-axis), or CD19 expression (x-axis) and HLA-E expression (y-axis) in T cells modified as described herein.

### DETAILED DESCRIPTION

### Definitions and Abbreviations

[0123] Unless otherwise specified, each of the following terms have the meaning set forth in this section.

[0124] The indefinite articles “a” and “an” refer to at least one of the associated noun, and are used interchangeably with the terms “at least one” and “one or more.” The conjunctions “or” and “and/or” are used interchangeably as non-exclusive disjunctions.

[0125] The term “cancer” (also used interchangeably with the term “neoplastic”), as used herein, refers to cells having the capacity for autonomous growth, i.e., an abnormal state or condition characterized by rapidly proliferating cell growth. Cancerous disease states may be categorized as pathologic, i.e., characterizing or constituting a disease state, e.g., malignant tumor growth, or may be categorized as non-pathologic, i.e., a deviation from normal but not associated with a disease state. e.g., cell proliferation associated with wound repair.

[0126] The terms “CRISPR/Cas nuclease” as used herein refer to any CRISPR/Cas protein with DNA nuclease activity, e.g., a Cas9 or a Cas12 protein that exhibits specific association (or “targeting”) to a DNA target site, e.g., within a genomic sequence in a cell in the presence of a guide molecule. The strategies, systems, and methods disclosed herein can use any combination of CRISPR/Cas nuclease disclosed herein, or known to those of ordinary skill in the art. Those of ordinary skill in the art will be aware of additional CRISPR/Cas nucleases and variants suitable for use in the context of the present disclosure, and it will be understood that the present disclosure is not limited in this respect.

[0127] The term “differentiation” as used herein is the process by which an unspecialized (“uncommitted”) or less specialized cell acquires the features of a specialized cell such as, for example, a blood cell. In some embodiments, a differentiated or differentiation-induced cell is one that has taken on a more specialized (“committed”) position within the lineage of a cell. For example, an iPS cell (iPSC) can be differentiated into various more differentiated cell types, for example, a hematopoietic stem cell, a lymphocyte, and other cell types, upon treatment with suitable differentiation factors in the cell culture medium. Suitable methods, differentiation factors, and cell culture media for the differentiation of pluri- and multipotent cell types into more differentiated cell types are well known to those of skill in the art. In some embodiments, the term “committed”, is applied to the process of differentiation to refer to a cell that has proceeded through a differentiation pathway to a point where, under normal circumstances, it would or will continue to differentiate into a specific cell type or subset of cell types, and cannot, under normal circumstances, differentiate into a different cell type (other than a specific cell type or subset of cell types) nor revert to a less differentiated cell type.

[0128] The terms “differentiation marker,” “differentiation marker gene.” or “differentiation gene,” as used herein refers to genes or proteins whose expression are indicative of cell differentiation occurring within a cell, such as a pluripotent cell. In some embodiments, differentiation marker genes include, but are not limited to, the following genes: CD34, CD4, CD8, CD3, CD56 (NCAM), CD49, CD45, NK cell receptor (cluster of differentiation 16 (CD16)), natural killer group-2 member D (NKG2D), CD69, NKp30, NKp44, NKp46, CD158b, FOXA2, FGF5, SOX17, XIST, NODAL, COL3A1, OTX2, DUSP6, EOMES, NR2F2, NROB1, CXCR4, CYP2B6, GAT A3, GATA4, ERBB4, GATA6, HOXC6, INHA, SMAD6, RORA, NIPBL, TNFSF11, CDH11, ZIC4, GAL, SOX3, PITX2, APOA2, CXCL5, CER1, FOXQ1, MLL5, DPP10, GSC, PCDH10, CTCFL, PCDH20, TSHZ1, MEGF10, MYC, DKK1, BMP2, LEFTY2, HES1, CDX2, GNAS, EGR1, COL3A1. TCF4, HEPH, KDR, TOX, FOXA1, LCK, PCDH7, CD1D FOXG1, LEFTY1, TUJ1, T gene (Brachyury), ZIC1, GATA1, GATA2, HDAC4, HDAC5, HDAC7, HDAC9, NOTCH1, NOTCH2, NOTCH4, PAX5, RBPJ, RUNX1, STAT1 and STAT3.

[0129] The terms “differentiation marker gene profile.” or “differentiation gene profile.” “differentiation gene expression profile.” “differentiation gene expression signature.” “differentiation gene expression panel.” “differentiation gene panel.” or “differentiation gene signature” as used herein refer to expression or levels of expression of a plurality of differentiation marker genes.

[0130] The term “nuclease” as used herein refers to any protein that catalyzes the cleavage of phosphodiester bonds. In some embodiments the nuclease is a DNA nuclease. In some embodiments the nuclease is a “nickase” which causes a single-strand break when it cleaves double-stranded DNA. e.g., genomic DNA in a cell. In some embodiments the nuclease causes a double-strand break when it cleaves double-stranded DNA, e.g., genomic DNA in a cell. In some embodiments the nuclease binds a specific target site within the double-stranded DNA that overlaps with or is adjacent to the location of the resulting break. In some embodiments, the nuclease causes a double-strand break that contains overhangs ranging from 0 (blunt ends) to 22 nucleotides in both 3′ and 5′ orientations. As discussed herein, CRISPR/Cas nucleases, zinc finger nucleases (ZFNs), transcription activator-like effector nucleases (TALENs) and meganucleases are exemplary nucleases that can be used in accordance with the strategies, systems, and methods of the present disclosure.

[0131] The term “edited iNK cell” as used herein refers to an iNK cell which has been modified to change at least one expression product of at least one gene at some point in the development of the cell. In some embodiments, a modification can be introduced using, e.g., gene editing techniques such as CRISPR-Cas or, e.g., dominant-negative constructs. In some embodiments, an iNK cell is edited at a time point before it has differentiated into an iNK cell, e.g., at a precursor stage, at a stem cell stage, etc. In some embodiments, an edited iNK cell is compared to a non-edited iNK cell (an NK cell produced by differentiating an iPSC cell, which iPSC cell and/or iNK cell do not have modifications, e.g., genetic modifications).

[0132] The term “embryonic stem cell” as used herein refers to pluripotent stem cells derived from the inner cell mass of the embryonic blastocyst. In some embodiments, embryonic stem cells are pluripotent and give rise during development to all derivatives of the three primary germ layers: ectoderm, endoderm and mesoderm. In some such embodiments, embryonic stem cells do not contribute to the extra-embryonic membranes or the placenta, i.e., are not totipotent.

[0133] The term “endogenous,” as used herein in the context of nucleic acids refers to a native nucleic acid (e.g., a gene, a protein coding sequence) in its natural location, e.g., within the genome of a cell.

[0134] The term “essential gene” as used herein with respect to a cell refers to a gene that encodes at least one gene product that is required for survival and/or proliferation of the cell. An essential gene can be a housekeeping gene that is essential for survival of all cell types or a gene that is required to be expressed in a specific cell type for survival and/or proliferation under particular culture conditions, e.g., for proper differentiation of iPS or ES cells or expansion of iPS- or ES-derived cells. Loss of function of an essential gene results, in some embodiments, in a significant reduction of cell survival, e.g., of the time a cell characterized by a loss of function of an essential gene survives as compared to a cell of the same cell type but without a loss of function of the same essential gene. In some embodiments, loss of function of an essential gene results in the death of the affected cell. In some embodiments, loss of function of an essential gene results in a significant reduction of cell proliferation, e.g., in the ability of a cell to divide, which can manifest in a significant time period the cell requires to complete a cell cycle, or, in some preferred embodiments, in a loss of a cell's ability to complete a cell cycle, and thus to proliferate at all.

[0135] The term “exogenous,” as used herein in the context of nucleic acids refers to a nucleic acid (whether native or non-native) that has been artificially introduced into a man-made construct (e.g., a knock-in cassette, or a donor template) or into the genome of a cell using, for example, gene editing or genetic engineering techniques, e.g., HDR based integration techniques.

[0136] The term “genome editing system” refers to any system having RNA-guided DNA editing activity.

[0137] The term “guide molecule” or “guide RNA” or “gRNA” when used in reference to a CRISPR/Cas system is any nucleic acid that promotes the specific association (or “targeting”) of a CRISPR/Cas nuclease, e.g., a Cas9 or a Cas12 protein to a DNA target site such as within a genomic sequence in a cell. While guide molecules are typically RNA molecules it is well known in the art that chemically modified RNA molecules including DNA/RNA hybrid molecules can be used as guide molecules.

[0138] The terms “hematopoietic stem cell,” or “definitive hematopoietic stem cell” as used herein, refer to CD34-positive (CD34+) stem cells. In some embodiments, CD34-positive stem cells are capable of giving rise to mature myeloid and/or lymphoid cell types. In some embodiments, the myeloid and/or lymphoid cell types include, for example, T cells, natural killer (NK) cells and/or B cells.

[0139] The terms “induced pluripotent stem cell”, “iPS cell” or “iPSC” as used herein to refer to a stem cell obtained from a differentiated somatic (e.g., adult, neonatal, or fetal) cell by a process referred to as reprogramming (e.g., dedifferentiation). In some embodiments, reprogrammed cells are capable of differentiating into tissues of all three germ or dermal layers: mesoderm, endoderm, and ectoderm. iPSCs are not found in nature.

[0140] The terms “iPS-derived NK cell” or “iNK cell” or as used herein refers to a natural killer cell which has been produced by differentiating an iPS cell, which iPS cell may or may not have a genetic modification.

[0141] The terms “iPS-derived T cell” or “iT cell” or as used herein refers to a T which has been produced by differentiating an iPS cell, which iPS cell may or may not have a genetic modification.

[0142] The term “multipotent stem cell” as used herein refers to a cell that has the developmental potential to differentiate into cells of one or more germ layers (ectoderm, mesoderm and endoderm), but not all three germ layers. Thus, in some embodiments, a multipotent cell may also be termed a “partially differentiated cell.” Multipotent cells are well-known in the art, and examples of multipotent cells include adult stem cells, such as for example, hematopoietic stem cells and neural stem cells. In some embodiments, “multipotent” indicates that a cell may form many types of cells in a given lineage, but not cells of other lineages. For example, a multipotent hematopoietic cell can form the many different types of blood cells (red, white, platelets, etc.), but it cannot form neurons. Accordingly, in some embodiments, “multipotency” refers to a state of a cell with a degree of developmental potential that is less than totipotent and pluripotent.

[0143] The term “pluripotent” as used herein refers to ability of a cell to form all lineages of the body or soma (i.e., the embryo proper) or a given organism (e.g., human). For example, embryonic stem cells are a type of pluripotent stem cells that are able to form cells from each of the three germ layers, the ectoderm, the mesoderm, and the endoderm. Generally, pluripotency may be described as a continuum of developmental potencies ranging from an incompletely or partially pluripotent cell (e.g., an epiblast stem cell or EpiSC), which is unable to give rise to a complete organism to the more primitive, more pluripotent cell, which is able to give rise to a complete organism (e.g., an embryonic stem cell or an induced pluripotent stem cell).

[0144] The term “pluripotency” as used herein refers to a cell that has the developmental potential to differentiate into cells of all three germ layers (ectoderm, mesoderm, and endoderm). In some embodiments, pluripotency can be determined, in part, by assessing pluripotency characteristics of the cells. In some embodiments, pluripotency characteristics include, but are not limited to: (i) pluripotent stem cell morphology; (ii) the potential for unlimited self-renewal; (iii) expression of pluripotent stem cell markers including, but not limited to SSEA1 (mouse only), SSEA3/4, SSEA5, TRA1-60/81, TRA1-85, TRA2-54, GC™-2, TG343, TG30, CD9, CD29, CD133/prominin, CD140a, CD56, CD73. CD90. CD105, OCT4 (also known as POU5F1), NANOG, SOX2, CD30 and/or CD50; (iv) ability to differentiate to all three somatic lineages (ectoderm, mesoderm and endoderm); (v) teratoma formation consisting of the three somatic lineages; and (vi) formation of embryoid bodies consisting of cells from the three somatic lineages.

[0145] The term “pluripotent stem cell morphology” as used herein refers to the classical morphological features of an embryonic stem cell. In some embodiments, normal embryonic stem cell morphology is characterized as small and round in shape, with a high nucleus-to-cytoplasm ratio, the notable presence of nucleoli, and typical intercell spacing.

[0146] The term “polycistronic” or “multicistronic” when used herein with reference to a knock-in cassette refers to the fact that the knock-in cassette can express two or more proteins from the same mRNA transcript. Similarly, a “bicistronic” knock-in cassette is a knock-in cassette that can express two proteins from the same mRNA transcript.

[0147] The term “polynucleotide” (including, but not limited to “nucleotide sequence”, “nucleic acid”, “nucleic acid molecule”, “nucleic acid sequence”, and “oligonucleotide”) as used herein refers to a series of nucleotide bases (also called “nucleotides”) and means any chain of two or more nucleotides. In some embodiments, polynucleotides, nucleotide sequences, nucleic acids, etc. can be chimeric mixtures or derivatives or modified versions thereof, single-stranded or double-stranded. In some such embodiments, modifications can occur at the base moiety, sugar moiety, or phosphate backbone, for example, to improve stability of the molecule, its hybridization parameters, etc. In general, a nucleotide sequence typically carries genetic information, including, but not limited to, the information used by cellular machinery to make proteins and enzymes. In some embodiments, a nucleotide sequence and/or genetic information comprises double- or single-stranded genomic DNA, RNA, any synthetic and genetically manipulated polynucleotide, and/or sense and/or antisense polynucleotides. In some embodiments, nucleic acids contain modified bases.

[0148] Conventional IUPAC notation is used in nucleotide sequences presented herein, as shown in Table 1, below (see also Cornish-Bowden, Nucleic Acids Res. 1985; 13 (9): 3021-30, incorporated by reference herein). It should be noted, however, that “T” denotes “Thymine or Uracil” in those instances where a sequence may be encoded by either DNA or RNA, for example in certain CRISPR/Cas guide molecule targeting domains.

TABLE 1
IUPAC nucleic acid notation

| Character | Base |
|---|---|
| A | Adenine |
| T | Thymine or Uracil |
| G | Guanine |
| C | Cytosine |
| U | Uracil |
| K | G or T/U |
| M | A or C |
| R | A or G |
| Y | C or T/U |
| S | C or G |
| W | A or T/U |
| B | C, G or T/U |
| V | A, C or G |
| H | A, C or T/U |
| D | A, G or T/U |
| N | A, C, G or T/U |

[0149] The terms “potency” or “developmental potency” as used herein refer to the sum of all developmental options accessible to the cell (i.e., the developmental potency), particularly, for example in the context of cellular developmental potential. In some embodiments, the continuum of cell potency includes, but is not limited to, totipotent cells, pluripotent cells, multipotent cells, oligopotent cells, unipotent cells, and terminally differentiated cells.

[0150] The terms “prevent,” “preventing.” and “prevention” as used herein with reference to a disease refer to the prevention of the disease in a mammal, e.g., in a human, including (a) avoiding or precluding the disease; (b) affecting the predisposition toward the disease; or (c) preventing or delaying the onset of at least one symptom of the disease.

[0151] The terms “protein.” “peptide” and “polypeptide” as used herein are used interchangeably to refer to a sequential chain of amino acids linked together via peptide bonds. The terms include individual proteins, groups or complexes of proteins that associate together, as well as fragments or portions, variants, derivatives and analogs of such proteins. Unless otherwise specified, peptide sequences are presented herein using conventional notation, beginning with the amino or N-terminus on the left, and proceeding to the carboxyl or C-terminus on the right. Standard one-letter or three-letter abbreviations can be used.

[0152] The term “gene product of interest” as used herein can refer to any product encoded by a gene including any polynucleotide or polypeptide. In some embodiments the gene product is a protein which is not naturally expressed by a target cell of the present disclosure. In some embodiments the gene product is a protein which confers a new therapeutic activity to the cell such as, but not limited to, a chimeric antigen receptor (CAR) or antigen-binding fragment thereof, a T cell receptor or antigen-binding portion thereof, a non-naturally occurring variant of FcγRIII (CD16), interleukin 15 (IL-15), interleukin 15 receptor (IL-15R) or a variant thereof, interleukin 12 (IL-12), interleukin-12 receptor (IL-12R) or a variant thereof, human leukocyte antigen G (HLA-G), human leukocyte antigen E (HLA-E), leukocyte surface antigen cluster of differentiation CD47 (CD47), or any combination of two or more thereof. It is to be understood that the methods and cells of the present disclosure are not limited to any particular gene product of interest and that the selection of a gene product of interest will depend on the type of cell and ultimate use of the cells.

[0153] The term “reporter gene” as used herein refers to an exogenous gene that has been introduced into a cell, e.g., integrated into the genome of the cell, that confers a trait suitable for artificial selection. Common reporter genes are fluorescent reporter genes that encode a fluorescent protein, e.g., green fluorescent protein (GFP) and antibiotic resistance genes that confer antibiotic resistance to cells.

[0154] The terms “reprogramming” or “dedifferentiation” or “increasing cell potency” or “increasing developmental potency” as used herein refer to a method of increasing potency of a cell or dedifferentiating a cell to a less differentiated state. For example, in some embodiments, a cell that has an increased cell potency has more developmental plasticity (i.e., can differentiate into more cell types) compared to the same cell in the non-reprogrammed state. That is, in some embodiments, a reprogrammed cell is one that is in a less differentiated state than the same cell in a non-reprogrammed state. In some embodiments, “reprogramming” refers to de-differentiating a somatic cell, or a multipotent stem cell, into a pluripotent stem cell, also referred to as an induced pluripotent stem cell, or iPSC. Suitable methods for the generation of iPSCs from somatic or multipotent stem cells are well known to those of skill in the art.

[0155] The terms “RNA-guided nuclease” and “RNA-guided nuclease molecule” are used interchangeably herein. In some embodiments, the RNA-guided nuclease is a RNA-guided DNA endonuclease enzyme. In some embodiments, the RNA-guided nuclease is a CRISPR nuclease. Non-limiting examples of RNA-guided nucleases are listed in Table 5 below, and the methods and compositions disclosed herein can use any combination of RNA-guided nucleases disclosed herein, or known to those of ordinary skill in the art. Those of ordinary skill in the art will be aware of additional nucleases and nuclease variants suitable for use in the context of the present disclosure, and it will be understood that the present disclosure is not limited in this respect.

[0156] Additional suitable RNA-guided nucleases, e.g., Cas9 and Cas12 nucleases, will be apparent to the skilled artisan in view of the present disclosure, and the disclosure is not limited by the exemplary suitable nucleases provided herein. In some embodiments, a suitable nuclease is a Cas12a, Cas9, Cas12b. Cas12c, Cas12e, CasX, or CasΦ (Cas12j), or a variant thereof (e.g., a variant with a high editing efficiency, e.g., capable of editing about 60% to 100% of cells in a population of cells) nuclease. In some embodiments, the disclosure also embraces nuclease variants, e.g., Cas9. Cpf1 (Cas12a, such as the Mad7 Cas12a variant), Cas12b, Cas12c, CasX, or Cas (Cas12j) nuclease variants. In some embodiments, a nuclease is a nuclease variant, which refers to a nuclease comprising an amino acid sequence characterized by one or more amino acid substitutions, deletions, or additions as compared to the wild type amino acid sequence of the nuclease. In some embodiments, a suitable nuclease and/or nuclease variant may also include purification tags (e.g., polyhistidine tags) and/or signaling peptides, e.g., comprising or consisting of a nuclear localization signal sequence. Some non-limiting examples of suitable nucleases and nuclease variants are described in more detail elsewhere herein and also include those described in PCT application PCT/US2019/22374, filed Mar. 14, 2019, and entitled “Systems and Methods for the Treatment of Hemoglobinopathies,” the entire contents of which are incorporated herein by reference. In some embodiments, the RNA-guided nuclease is an Acidaminococcus sp. Cpf1 variant (AsCpf1 variant). In some embodiments, suitable Cpf1 nuclease variants, including suitable AsCpf1 variants will be known or apparent to those of ordinary skill in the art based on the present disclosure, and include, but are not limited to, the Cpf1 variants disclosed herein or otherwise known in the art. For example, in some embodiments, the RNA-guided nuclease is a Acidaminococcus sp. Cpf1 RR variant (AsCpf1-RR). In another embodiment, the RNA-guided nuclease is a Cpf1 RVR variant. For example, suitable Cpf1 variants include those having an M537R substitution, an H800A substitution, and/or an F870L substitution, or any combination thereof (numbering scheme according to AsCpf1 wild-type sequence).

[0157] The term “subject” as used herein means a human or non-human animal. In some embodiments a human subject can be any age (e.g., a fetus, infant, child, young adult, or adult). In some embodiments a human subject may be at risk of or suffer from a disease, or may be in need of alteration of a gene or a combination of specific genes. Alternatively, in some embodiments, a subject may be a non-human animal, which may include, but is not limited to, a mammal. In some embodiments, a non-human animal is a non-human primate, a rodent (e.g., a mouse, rat, hamster, guinea pig, etc.), a rabbit, a dog, a cat, and so on. In certain embodiments of this disclosure, the non-human animal subject is livestock, e.g., a cow, a horse, a sheep, a goat, etc. In certain embodiments, the non-human animal subject is poultry, e.g., a chicken, a turkey, a duck, etc.

[0158] The terms “treatment,” “treat,” and “treating.” as used herein refer to a clinical intervention aimed to reverse, alleviate, delay the onset of, or inhibit the progress, ameliorate, reduce severity of, prevent or delay the recurrence of a disease, disorder, or condition or one or more symptoms thereof, and/or improve one or more symptoms of a disease, disorder, or condition as described herein. In some embodiments, a condition includes an injury. In some embodiments, an injury may be acute or chronic (e.g., tissue damage from an underlying disease or disorder that causes, e.g., secondary damage such as tissue injury). In some embodiments, treatment, e.g., in the form of an iPSC-derived NK cell or a population of iPSC-derived NK cells as described herein, may be administered to a subject after one or more symptoms have developed and/or after a disease has been diagnosed. Treatment may be administered in the absence of symptoms, e.g., to prevent or delay onset of a symptom or inhibit onset or progression of a disease. For example, in some embodiments, treatment may be administered to a susceptible subject prior to the onset of symptoms (e.g., in light of genetic or other susceptibility factors). In some embodiments, treatment may also be continued after symptoms have resolved, for example to prevent or delay their recurrence. In some embodiments, treatment results in improvement and/or resolution of one or more symptoms of a disease, disorder or condition.

[0159] The term “variant” as used herein refers to an entity such as a polypeptide or polynucleotide that shows significant structural identity with a reference entity but differs structurally from the reference entity in the presence or level of one or more chemical moieties as compared with the reference entity. In many embodiments, a variant also differs functionally from its reference entity. In general, whether a particular entity is properly considered to be a “variant” of a reference entity is based on its degree of structural identity with the reference entity. As used herein, the terms “functional variant” refer to a variant that confers the same function as the reference entity, e.g., a functional variant of a gene product of an essential gene is a variant that promotes the survival and/or proliferation of a cell. It is to be understood that a functional variant need not be functionally equivalent to the reference entity as long as it confers the same function as the reference entity.

### Target Cells

[0160] Methods of the disclosure can be used to edit the genome of any cell, e.g., primary cells.

[0161] In certain embodiments, a target cell is a primary cell. e.g., a cell isolated from a human subject. In certain embodiments, a target cell is an immune cell, e.g., a primary immune cell isolated from a human subject. In certain embodiments, a target cell is part of a population of cells isolated from a subject, e.g., a human subject. In some embodiments, the population of cells comprises a population of immune cells isolated from a subject. In some embodiments, the population of cells comprises tumor infiltrating lymphocytes (TILs), e.g., TILs isolated from a human subject. In some embodiments, a target cell is isolated from a healthy subject, e.g., a healthy human donor. In some embodiments, a target cell is isolated from a subject having a disease or illness, e.g., a human patient in need of a treatment.

[0162] In certain embodiments, a target cell is an immune cell, e.g., a primary immune cell, e.g., a CD8⁺ T cell, a CD8⁺ naïve T cell, a CD4⁺ central memory T cell, a CD8⁺ central memory T cell, a CD4⁺ effector memory T cell, a CD4⁺ effector memory T cell, a CD4⁺ T cell, a CD4⁺ stem cell memory T cell, a CD8⁺ stem cell memory T cell, a CD4⁺ helper T cell, a regulatory T cell, a cytotoxic T cell, a natural killer T cell, a CD4+ naïve T cell, a TH17 CD4⁺ T cell, a TH1 CD4⁺ T cell, a TH2 CD4⁺ T cell, a TH9 CD4⁺ T cell, a CD4⁺ Foxp3⁺ T cell, a CD4⁺ CD25⁺ CD127⁻ T cell, or a CD4⁺ CD25⁺ CD127⁻ Foxp3⁺ T cell. In some embodiments, a target cell is an alpha-beta T cell, a gamma-delta T cell or a Treg. In some embodiments a target cell is macrophage. In some embodiments, a target cell is an innate lymphoid cell. In some embodiments, a target cell is a dendritic cell. In some embodiments, a target cell is a beta cell, e.g., a pancreatic beta cell.

[0163] In some embodiments, a target cell is isolated from a subject having a cancer, including but not limited to, acoustic neuroma; adenocarcinoma; adrenal gland cancer; anal cancer; angiosarcoma (e.g., lymphangiosarcoma, lymphangioendotheliosarcoma, hemangiosarcoma); appendix cancer; benign monoclonal gammopathy; biliary cancer (e.g., cholangiocarcinoma); bile duct cancer; bladder cancer; bone cancer; breast cancer (e.g., adenocarcinoma of the breast, papillary carcinoma of the breast, mammary cancer, medullary carcinoma of the breast); brain cancer (e.g., meningioma, glioblastomas, glioma (e.g., astrocytoma, oligodendroglioma, medulloblastoma); bronchus cancer; carcinoid tumor; cardiac tumor; cervical cancer (e.g., cervical adenocarcinoma); choriocarcinoma; chordoma; craniopharyngioma; colorectal cancer (e.g., colon cancer, rectal cancer, colorectal adenocarcinoma); connective tissue cancer; epithelial carcinoma; ductal carcinoma in situ; ependymoma; endotheliosarcoma (e.g., Kaposi's sarcoma, multiple idiopathic hemorrhagic sarcoma); endometrial cancer (e.g., uterine cancer, uterine sarcoma); esophageal cancer (e.g., adenocarcinoma of the esophagus. Barrett's adenocarcinoma); Ewing's sarcoma; eye cancer (e.g., intraocular melanoma, retinoblastoma); familiar hypercosinophilia; gall bladder cancer; gastric cancer (e.g., stomach adenocarcinoma); gastrointestinal stromal tumor (GIST); germ cell cancer; head and neck cancer (e.g., head and neck squamous cell carcinoma, oral cancer (e.g., oral squamous cell carcinoma), throat cancer (e.g., laryngeal cancer, pharyngeal cancer, nasopharyngeal cancer, oropharyngeal cancer); hematopoietic cancer (e.g., lymphomas, primary pulmonary lymphomas, bronchus-associated lymphoid tissue lymphomas, splenic lymphomas, nodal marginal zone lymphomas, pediatric B cell non-Hodgkin lymphomas); hemangioblastoma; histiocytosis; hypopharynx cancer; inflammatory myofibroblastic tumors; immunocytic amyloidosis; kidney cancer (e.g., nephroblastoma a.k.a. Wilms' tumor, renal cell carcinoma); liver cancer (e.g., hepatocellular cancer (HCC), malignant hepatoma); lung cancer (e.g., bronchogenic carcinoma, small cell lung cancer (SCLC), non-small cell lung cancer (NSCLC), adenocarcinoma of the lung); leiomyosarcoma (LMS); melanoma; midline tract carcinoma; multiple endocrine neoplasia syndrome; muscle cancer; mesothelioma; nasopharynx cancer; neuroblastoma; neurofibroma (e.g., neurofibromatosis (NF) type 1 or type 2, schwannomatosis); neuroendocrine cancer (e.g., gastroenteropancreatic neuroendocrine tumor (GEP-NET), carcinoid tumor); osteosarcoma (e.g., bone cancer); ovarian cancer (e.g., cystadenocarcinoma, ovarian embryonal carcinoma, ovarian adenocarcinoma); papillary adenocarcinoma; pancreatic cancer (e.g., pancreatic adenocarcinoma, intraductal papillary mucinous neoplasm (IPMN), Islet cell tumors); parathyroid cancer; papillary adenocarcinoma; penile cancer (e.g., Paget's disease of the penis and scrotum); pharyngeal cancer; pincaloma; pituitary cancer; pleuropulmonary blastoma; primitive neuroectodermal tumor (PNT); plasma cell neoplasia; parancoplastic syndromes; intraepithelial neoplasms; prostate cancer (e.g., prostate adenocarcinoma); rectal cancer; rhabdomyosarcoma; retinoblastoma; salivary gland cancer; skin cancer (e.g., squamous cell carcinoma (SCC), keratoacanthoma (KA), melanoma, basal cell carcinoma (BCC)); small bowel cancer (e.g., appendix cancer); soft tissue sarcoma (e.g., malignant fibrous histiocytoma (MFH), liposarcoma, malignant peripheral nerve sheath tumor (MPNST), chondrosarcoma, fibrosarcoma, myxosarcoma); sebaceous gland carcinoma; stomach cancer; small intestine cancer; sweat gland carcinoma; synovioma; testicular cancer (e.g., seminoma, testicular embryonal carcinoma); thymic cancer; thyroid cancer (e.g., papillary carcinoma of the thyroid, papillary thyroid carcinoma (PTC), medullary thyroid cancer); urethral cancer; uterine cancer; vaginal cancer; vulvar cancer (e.g., Paget's disease of the vulva), or any combination thereof.

[0164] In some embodiments, a target cell is isolated from a subject having a hematological disorder. In some embodiments, a target cell is isolated form a subject having sickle cell anemia. In some embodiments, a target cell is isolated from a subject having β-thalassemia.

[0165] In certain embodiments, the target cell is a stem cell, e.g., an iPS or ES cell. In certain embodiments, the target cell can be an iPS- or ES-derived cell, where the genetic modification is made at any stage during the reprogramming process from donor cell to iPSC, during the iPSC stage, and/or at any stage of the process of differentiating the iPSC or ESC to a specialized cell, or even up to or at the final specialized cell state. In certain embodiments, the target cell can be an iPS-derived NK cell (iNK cell) or iPS-derived T cell (iT cell) where the genetic modification is made at any stage during the reprogramming process from donor cell to iPSC, during the iPSC stage, and/or at any stage of the process of differentiating the iPSC to an iNK or iT state, e.g., at an intermediary state, such as, for example, an iPSC-derived HSC state, or even up to or at the final iNK or iT cell state.

[0166] In certain embodiments, a target cell is one or more of a long-term hematopoietic stem cell, a short term hematopoietic stem cell, a multipotent progenitor cell, a lineage restricted progenitor cell, a lymphoid progenitor cell, a myeloid progenitor cell, a common myeloid progenitor cell, an erythroid progenitor cell, a megakaryocyte erythroid progenitor cell, a retinal cell, a photoreceptor cell, a rod cell, a cone cell, a retinal pigmented epithelium cell, a trabecular meshwork cell, a cochlear hair cell, an outer hair cell, an inner hair cell, a pulmonary epithelial cell, a bronchial epithelial cell, an alveolar epithelial cell, a pulmonary epithelial progenitor cell, a striated muscle cell, a cardiac muscle cell, a muscle satellite cell, a neuron, a neuronal stem cell, a mesenchymal stem cell, an induced pluripotent stem (iPS) cell, an embryonic stem cell, a fibroblast, a monocyte-derived macrophage or dendritic cell, a megakaryocyte, a neutrophil, an cosinophil, a basophil, a mast cell, a reticulocyte, a B cell. e.g., a progenitor B cell, a Pre B cell, a Pro B cell, a memory B cell, a plasma B cell, a gastrointestinal epithelial cell, a biliary epithelial cell, a pancreatic ductal epithelial cell, an intestinal stem cell, a hepatocyte, a liver stellate cell, a Kupffer cell, an osteoblast, an osteoclast, an adipocyte, a preadipocyte, a pancreatic islet cell (e.g., a beta cell, an alpha cell, a delta cell), a pancreatic exocrine cell, a Schwann cell, or an oligodendrocyte. In some embodiments, a target cell is a neuronal progenitor cell. In some embodiments, a target cell is a neuron.

[0167] In some embodiments, a target cell is a circulating blood cell, e.g., a reticulocyte, megakaryocyte erythroid progenitor (MEP) cell, myeloid progenitor cell (CMP/GMP), lymphoid progenitor (LP) cell, hematopoietic stem/progenitor cell (HSC), or endothelial cell (EC). In some embodiments, a target cell is one or more of a bone marrow cell (e.g., a reticulocyte, an erythroid cell (e.g., erythroblast), an MEP cell, myeloid progenitor cell (CMP/GMP), LP cell, crythroid progenitor (EP) cell, HSC, multipotent progenitor (MPP) cell, endothelial cell (EC), hemogenic endothelial (HE) cell, or mesenchymal stem cell). In some embodiments, a target cell is one or more of a myeloid progenitor cell (e.g., a common myeloid progenitor (CMP) cell or granulocyte macrophage progenitor (GMP) cell). In some embodiments, a target cell is a lymphoid progenitor cell, e.g., a common lymphoid progenitor (CLP) cell. In some embodiments, a target cell is one or more of an erythroid progenitor cell (e.g., an MEP cell). In some embodiments, a target cell is one or more of a hematopoietic stem/progenitor cell (e.g., a long term HSC (LT-HSC), short term HSC (ST-HSC), MPP cell, or lineage restricted progenitor (LRP) cell). In certain embodiments, the target cell is a CD34⁺ cell, CD34⁺ CD90⁺ cell. CD34⁺ CD38-cell, CD34⁺ CD90⁺ CD49f+CD38 CD45RA″ cell, CD105⁺ cell, CD31⁺, or CD133⁺ cell, or a CD34⁺ CD90⁺ CD133⁺ cell. In some embodiments, a target cell is one or more of an umbilical cord blood CD34⁺ HSPC, umbilical cord venous endothelial cell, umbilical cord arterial endothelial cell, amniotic fluid CD34⁺ cell, amniotic fluid endothelial cell, placental endothelial cell, or placental hematopoietic CD34⁺ cell. In some embodiments, a target cell is one or more of a mobilized peripheral blood hematopoietic CD34⁺ cell (after the subject is treated with a mobilization agent, e.g., G-CSF or Plerixafor). In some embodiments, a target cell is a peripheral blood endothelial cell. In some embodiments, a target cell is a peripheral blood natural killer cell.

### Stem Cells

[0168] Methods of the disclosure can be used with stem cells. Stem cells are typically cells that have the capacity to produce unaltered daughter cells (self-renewal; cell division produces at least one daughter cell that is identical to the parent cell) and to give rise to specialized cell types (potency). Stem cells include, but are not limited to, embryonic stem (ES) cells, embryonic germ (EG) cells, germline stem (GS) cells, human mesenchymal stem cells (hMSCs), adipose tissue-derived stem cells (ADSCs), multipotent adult progenitor cells (MAPCs), multipotent adult germline stem cells (maGSCs) and unrestricted somatic stem cell (USSCs). Generally, stem cells can divide without limit. After division, the stem cell may remain as a stem cell, become a precursor cell, or proceed to terminal differentiation. A precursor cell is a cell that can generate a fully differentiated functional cell of at least one given cell type. Generally, precursor cells can divide. After division, a precursor cell can remain a precursor cell, or may proceed to terminal differentiation.

[0169] Pluripotent stem cells are generally known in the art. The present disclosure provides technologies (e.g., systems, compositions, methods, etc.) related to pluripotent stem cells. In some embodiments, pluripotent stem cells are stem cells that: (a) are capable of inducing teratomas when transplanted in immunodeficient (SCID) mice; (b) are capable of differentiating to cell types of all three germ layers (e.g., can differentiate to ectodermal, mesodermal, and endodermal cell types); and/or (c) express one or more markers of embryonic stem cells (e.g., human embryonic stem cells express Oct-4, alkaline phosphatase, SSEA-3 surface antigen, SSEA-4 surface antigen, nanog, TRA-1-60, TRA-1-81, Sox-2, REX1, etc.). In some aspects, human pluripotent stem cells do not show expression of differentiation markers. In some embodiments, ES cells and/or iPSCs edited using methods of the disclosure maintain their pluripotency, e.g., (a) are capable of inducing teratomas when transplanted in immunodeficient (SCID) mice; (b) are capable of differentiating to cell types of all three germ layers, e.g., can differentiate to ectodermal, mesodermal, and endodermal cell types); and/or (c) express one or more markers of embryonic stem cells.

[0170] In some embodiments, ES cells (e.g., human ES cells) can be derived from the inner cell mass of blastocysts or morulae. In some embodiments, ES cells can be isolated from one or more blastomeres of an embryo, e.g., without destroying the remainder of the embryo. In some embodiments, ES cells can be produced by somatic cell nuclear transfer. In some embodiments, ES cells can be derived from fertilization of an egg cell with sperm or DNA, nuclear transfer, parthenogenesis, or by means to generate ES cells, e.g., with homozygosity in the HLA region. In some embodiments, human ES cells can be produced or derived from a zygote, blastomeres, or blastocyst-staged mammalian embryo produced by the fusion of a sperm and egg cell, nuclear transfer, parthenogenesis, or the reprogramming of chromatin and subsequent incorporation of the reprogrammed chromatin into a plasma membrane to produce an embryonic cell. Exemplary human ES cells are known in the art and include, but are not limited to, MA01, MA09, ACT-4, No. 3. H1, H7, H9, H14 and ACT30 ES cells. In some embodiments, human ES cells, regardless of their source or the particular method used to produce them, can be identified based on. e.g., (i) the ability to differentiate into cells of all three germ layers, (ii) expression of at least Oct-4 and alkaline phosphatase, and/or (iii) ability to produce teratomas when transplanted into immunocompromised animals. In some embodiments, ES cells have been serially passaged as cell lines.

### iPS Cells

[0171] Induced pluripotent stem cells (iPSC) are a type of pluripotent stem cell artificially derived from a non-pluripotent cell, such as an adult somatic cell (e.g., a fibroblast cell or other suitable somatic cell), by inducing expression of certain genes. iPSCs can be derived from any organism, such as a mammal. In some embodiments, iPSCs are produced from mice, rats, rabbits, guinea pigs, goats, pigs, cows, non-human primates or humans. iPSCs are similar to ES cells in many respects, such as the expression of certain stem cell genes and proteins, chromatin methylation patterns, doubling time, embryoid body formation, teratoma formation, viable chimera formation, potency and/or differentiability. Various suitable methods for producing iPSCs are known in the art. In some embodiments, iPSCs can be derived by transfection of certain stem cell-associated genes (such as Oct-3/4 (Pouf51) and Sox-2) into non-pluripotent cells, such as adult fibroblasts. Transfection can be achieved through viral vectors, such as retroviruses, lentiviruses, or adenoviruses. Additional suitable reprogramming methods include the use of vectors that do not integrate into the genome of the host cell, e.g., episomal vectors, or the delivery of reprogramming factors directly via encoding RNA or as proteins has also been described. For example, cells can be transfected with Oct-3/4, Sox-2, Klf4, and/or c-Myc using a retroviral system or with Oct-4, Sox-2, NANOG, and/or LIN28 using a lentiviral system. After 3-4 weeks, small numbers of transfected cells begin to become morphologically and biochemically similar to pluripotent stem cells, and can be isolated through morphological selection, doubling time, or through a reporter gene and antibiotic selection. In one example, iPSCs from adult human cells are generated by the method described by Yu et al., Science 2007; 318 (5854): 1224 or Takahashi et al., Cell 2007; 131:861-72. Numerous suitable methods for reprogramming are known to those of skill in the art, and the present disclosure is not limited in this respect.

[0172] In some embodiments, a target cell for the editing and cargo integration methods described herein is an iPSC, wherein the edited iPSC is then differentiated, e.g., into an iPSC-derived immune cell. In some embodiments, the differentiated cell is an iPSC-derived immune cell. In some embodiments, the differentiated cell is an iPSC-derived iNK cell, an iPSC-derived T cell (e.g., an iPSC-derived alpha-beta T cell, gamma-delta T cell, Treg, CD4+ T cell, or CD8+ T cell), an iPSC-derived dendritic cell, or an iPSC-derived macrophage. In some embodiments, the differentiated cell is an iPSC-derived pancreatic beta cell.

### iNK Cells

[0173] In some embodiments, the present disclosure provides methods of generating iNK cells (e.g., genetically modified iNK cells), e.g., derived from a genetically modified stem cell (e.g., iPSC).

[0174] In some embodiments, genetic modifications present in an iNK cell of the present disclosure can be made at any stage during the reprogramming process from donor cell to iPSC, during the iPSC stage, and/or at any stage of the process of differentiating the iPSC to an iNK state, e.g., at an intermediary state, such as, for example, an iPSC-derived HSC state, or even up to or at the final iNK cell state.

[0175] For example, one or more genomic modifications present in a genetically modified iNK cell of the present disclosure may be made at one or more different cell stages (e.g., reprogramming from donor to iPSC, differentiation of iPSC to iNK). In some embodiments, one or more genomic modifications present in a genetically modified iNK cell provided herein is made before reprogramming a donor cell to an iPSC state. In some embodiments, all edits present in a genetically modified iNK cell provided herein are made at the same time, in close temporal proximity, and/or at the same cell stage of the reprogramming/differentiation process, e.g., at the donor cell stage, during the reprogramming process, at the iPSC stage, or during the differentiation process, e.g., from iPSC to iNK. In some embodiments, two or more edits present in a genetically modified iNK cell provided herein are made at different times and/or at different cell stages of the reprogramming/differentiation process from donor cell to iPSC to iNK. For example, in some embodiments, a first edit is made at the donor cell stage and a second (different) edit is made at the iPSC stage. In some embodiments, a first edit is made at the reprogramming stage (e.g., donor to iPSC) and a second (different) edit is made at the iPSC stage.

[0176] A variety of cell types can be used as a donor cell that can be subjected to reprogramming, differentiation, and/or genetic engineering strategies described herein. For example, the donor cell can be a pluripotent stem cell or a differentiated cell, e.g., a somatic cell, such as, for example, a fibroblast or a T lymphocyte. In some embodiments, donor cells are manipulated (e.g., subjected to reprogramming, differentiation, and/or genetic engineering) to generate iNK cells described herein.

[0177] A donor cell can be from any suitable organism. For example, in some embodiments, the donor cell is a mammalian cell, e.g., a human cell or a non-human primate cell. In some embodiments, the donor cell is a somatic cell. In some embodiments, the donor cell is a stem cell or progenitor cell. In certain embodiments, the donor cell is not or was not part of a human embryo and its derivation does not involve destruction of a human embryo.

[0178] In some embodiments, a genetically modified iNK cell is derived from an iPSC, which in turn is derived from a somatic donor cell. Any suitable somatic cell can be used in the generation of iPSCs, and in turn, the generation of iNK cells. Suitable strategies for deriving iPSCs from various somatic donor cell types have been described and are known in the art. In some embodiments, a somatic donor cell is a fibroblast cell. In some embodiments, a somatic donor cell is a mature T cell.

[0179] For example, in some embodiments, a somatic donor cell, from which an iPSC, and subsequently an iNK cell is derived, is a developmentally mature T cell (a T cell that has undergone thymic selection). One hallmark of developmentally mature T cells is a rearranged T cell receptor locus. During T cell maturation, the TCR locus undergoes V (D) J rearrangements to generate complete V-domain exons. These rearrangements are retained throughout reprogramming of a T cells to an iPSC, and throughout differentiation of the resulting iPSC to a somatic cell.

[0180] In certain embodiments, a somatic donor cell is a CD8⁺ T cell, a CD8⁺ naïve T cell, a CD4⁺ central memory T cell, a CD8⁺ central memory T cell, a CD4⁺ effector memory T cell, a CD4⁺ effector memory T cell, a CD4⁺ T cell, a CD4⁺ stem cell memory T cell, a CD8⁺ stem cell memory T cell, a CD4⁺ helper T cell, a regulatory T cell, a cytotoxic T cell, a natural killer T cell, a CD4⁺ naïve T cell, a TH17 CD4⁺ T cell, a TH1 CD4⁺ T cell, a TH2 CD4⁺ T cell, a TH9 CD4⁺ T cell, a CD4⁺ Foxp3⁺ T cell, a CD4⁺ CD25⁺ CD127 T cell, or a CD4⁺ CD25⁺ CD127 Foxp3⁺ T cell.

[0181] T cells can be advantageous for the generation of iPSCs. For example, T cells can be edited with relative ease, e.g., by CRISPR-based methods or other genetic engineering methods. Additionally, the rearranged TCR locus allows for genetic tracking of individual cells and their daughter cells. For example, if the reprogramming, expansion, culture, and/or differentiation strategies involved in the generation of NK cells a clonal expansion of a single cell, the rearranged TCR locus can be used as a genetic marker unambiguously identifying a cell and its daughter cells. This, in turn, allows for the characterization of a cell population as truly clonal, or for the identification of mixed populations, or contaminating cells in a clonal population. Another potential advantage of using T cells in generating iNK cells carrying multiple edits is that certain karyotypic aberrations associated with chromosomal translocations are selected against in T cell culture. Such aberrations can pose a concern when editing cells by CRISPR technology, and in particular when generating cells carrying multiple edits. Using T cell derived iPSCs as a starting point for the derivation of therapeutic lymphocytes can allow for the expression of a pre-screened TCR in the lymphocytes, e.g., via selecting the T cells for binding activity against a specific antigen, e.g., a tumor antigen, reprogramming the selected T cells to iPSCs, and then deriving lymphocytes from these iPSCs that express the TCR (e.g., T cells). This strategy can allow for activating the TCR in other cell types, e.g., by genetic or epigenetic strategies. Additionally. T cells retain at least part of their “epigenetic memory” throughout the reprogramming process, and thus subsequent differentiation of the same or a closely related cell type, such as iNK cells can be more efficient and/or result in higher quality cell populations as compared to approaches using non-related cells, such as fibroblasts, as a starting point for iNK derivation.

[0182] In some embodiments, a donor cell being manipulated, e.g., a cell being reprogrammed and/or undergoing genetic engineering as described herein, is one or more of a long-term hematopoietic stem cell, a short term hematopoietic stem cell, a multipotent progenitor cell, a lineage restricted progenitor cell, a lymphoid progenitor cell, a myeloid progenitor cell, a common myeloid progenitor cell, an erythroid progenitor cell, a megakaryocyte erythroid progenitor cell, a retinal cell, a photoreceptor cell, a rod cell, a cone cell, a retinal pigmented epithelium cell, a trabecular meshwork cell, a cochlear hair cell, an outer hair cell, an inner hair cell, a pulmonary epithelial cell, a bronchial epithelial cell, an alveolar epithelial cell, a pulmonary epithelial progenitor cell, a striated muscle cell, a cardiac muscle cell, a muscle satellite cell, a neuron, a neuronal stem cell, a mesenchymal stem cell, an induced pluripotent stem (iPS) cell, an embryonic stem cell, a fibroblast, a monocyte-derived macrophage or dendritic cell, a megakaryocyte, a neutrophil, an cosinophil, a basophil, a mast cell, a reticulocyte, a B cell, e.g., a progenitor B cell, a Pre B cell, a Pro B cell, a memory B cell, a plasma B cell, a gastrointestinal epithelial cell, a biliary epithelial cell, a pancreatic ductal epithelial cell, an intestinal stem cell, a hepatocyte, a liver stellate cell, a Kupffer cell, an osteoblast, an osteoclast, an adipocyte, a preadipocyte, a pancreatic islet cell (e.g., a beta cell, an alpha cell, a delta cell), a pancreatic exocrine cell, a Schwann cell, or an oligodendrocyte.

[0183] In some embodiments, a donor cell is one or more of a circulating blood cell, e.g., a reticulocyte, megakaryocyte erythroid progenitor (MEP) cell, myeloid progenitor cell (CMP/GMP), lymphoid progenitor (LP) cell, hematopoietic stem/progenitor cell (HSC), or endothelial cell (EC). In some embodiments, a donor cell is one or more of a bone marrow cell (e.g., a reticulocyte, an erythroid cell (e.g., erythroblast), an MEP cell, myeloid progenitor cell (CMP/GMP), LP cell, erythroid progenitor (EP) cell, HSC, multipotent progenitor (MPP) cell, endothelial cell (EC), hemogenic endothelial (HE) cell, or mesenchymal stem cell). In some embodiments, a donor cell is one or more of a myeloid progenitor cell (e.g., a common myeloid progenitor (CMP) cell or granulocyte macrophage progenitor (GMP) cell). In some embodiments, a donor cell is one or more of a lymphoid progenitor cell, e.g., a common lymphoid progenitor (CLP) cell. In some embodiments, a donor cell is one or more of an crythroid progenitor cell (e.g., an MEP cell). In some embodiments, a donor cell is one or more of a hematopoietic stem/progenitor cell (e.g., a long term HSC (LT-HSC), short term HSC (ST-HSC), MPP cell, or lineage restricted progenitor (LRP) cell). In certain embodiments, the donor cell is a CD34⁺ cell. CD34⁺ CD90⁺ cell, CD34⁺ CD38 cell. CD34⁺ CD90⁺ CD49f+CD38 CD45RA cell, CD105⁺ cell, CD31⁺, or CD133⁺ cell, or a CD34⁺ CD90⁺ CD133⁺ cell. In some embodiments, a donor cell is one or more of an umbilical cord blood CD34⁺ HSPC, umbilical cord venous endothelial cell, umbilical cord arterial endothelial cell, amniotic fluid CD34⁺ cell, amniotic fluid endothelial cell, placental endothelial cell, or placental hematopoietic CD34⁺ cell. In some embodiments, a donor cell is one or more of a mobilized peripheral blood hematopoietic CD34⁺ cell (after the subject is treated with a mobilization agent, e.g., G-CSF or Plerixafor). In some embodiments, a donor cell is a peripheral blood endothelial cell. In some embodiments, a donor cell is a peripheral blood natural killer cell.

[0184] In some embodiments, a donor cell is a dividing cell. In some embodiments, a donor cell is a non-dividing cell.

[0185] In some embodiments, a genetically modified (e.g., edited) iNK cell resulting from one or more methods and/or strategies described herein, are administered to a subject in need thereof, e.g., in the context of an immuno-oncology therapeutic approach. In some embodiments, donor cells, or any cells of any stage of the reprogramming, differentiating, and/or genetic engineering strategies provided herein, can be maintained in culture or stored (e.g., frozen in liquid nitrogen) using any suitable method known in the art, e.g., for subsequent characterization or administration to a subject in need thereof.

### Genetically Modified Cells

### Loss-of-Function Modifications

[0186] In some embodiments, a target cell described herein (e.g., a primary cell or a stem cell (e.g., iPSC) described herein) is genetically engineered to introduce a disruption (e.g., a knockout) in one or more targets described herein. For example, in some embodiments, a target cell described herein (e.g., a primary cell or a stem cell (e.g., iPSC) described herein) can be genetically engineered to knockout all or a portion of one or more target gene, introduce a frameshift in one or more target genes, and/or cause a truncation of an encoded gene product (e.g., by introducing a premature stop codon). In some embodiments, a target cell described herein (e.g., a primary cell or a stem cell (e.g., iPSC) described herein) can be genetically engineered to knockout all or a portion of a target gene using a gene-editing system, e.g., as described herein. In some such embodiments, a gene-editing system may be or comprise a CRISPR system, a zinc finger nuclease system, a TALEN, and/or a meganuclease.

[0187] In some embodiments, the present disclosure provides methods suitable for high-efficiency knockout (e.g., a high proportion of a cell population comprises a knockout). In some embodiments, high-efficiency knockout results in at least 65% of the cells in a population of cells comprising a knockout (e.g., at least 65%, at least 70%, at least 75%, at least 80%, at least 85%, at least 90%, at least 91%, at least 92%, at least 93%, at least 94%, at least 95%, at least 96%, at least 97%, at least 98%, or at least 99% of the cells in a population of cells comprise a knockout).

[0188] In certain embodiments, the disclosure provides a genetically engineered target cell described herein (e.g., a primary cell or a stem cell (e.g., iPSC) described herein), and/or progeny cell, comprising a disruption in TGF signaling, e.g., TGF beta signaling. In some embodiments, this is useful, for example, in circumstances where it is desirable to generate a differentiated cell (e.g., an NK cell) from pluripotent stem cell, wherein TGF signaling, e.g., TGF beta signaling is disrupted in the differentiated cell.

[0189] TGF beta signaling inhibits or decreases the survival and/or activity of some differentiated cell types that are useful for therapeutic applications, e.g., TGF beta signaling is a negative regulator of natural killer cells, which can be used in immunotherapeutic applications. In some embodiments, it is desirable to generate a clinically effective number of natural killer cells comprising a genetic modification that disrupts TGF beta signaling, thus avoiding the negative effect of TGF beta on the clinical effectiveness of such cells. It is advantageous, in some embodiments, to source such NK cells from a pluripotent stem cell, instead, for example, from mature NK cells obtained from a donor. Modifying a stem cell instead of a differentiated cell has, among others, the advantage of allowing for clonal derivation, characterization, and/or expansion of a specific genotype, e.g., a specific stem cell clone harboring a specific genetic modification (e.g., a targeted disruption of TGFβRII in the absence of any undesired (e.g., off-target) modifications). In some embodiments, a stem cell, e.g., a human iPSC, is genetically engineered not to express one or more TGFβ receptor, e.g., TGFβRII, or to express a dominant negative variant of a TGFß receptor, e.g., a dominant negative TGFβRII variant. Exemplary sequences of TGFβRII are set forth in KR710923.1. NM_001024847.2, and NM_003242.5. An exemplary dominant negative TGFβRII is disclosed in Immunity. 2000 February; 12 (2): 171-81.

[0190] In certain embodiments, the disclosure provides a genetically engineered target cell described herein (e.g., a primary cell or a stem cell (e.g., iPSC) described herein), and/or progeny cell, that additionally or alternatively comprises a disruption in interleukin signaling, e.g., IL-15 signaling. IL-15 is a cytokine with structural similarity to Interleukin-2 (IL-2), which binds to and signals through a complex composed of IL-2/IL-15 receptor beta chain (CD122) and the common gamma chain (gamma-C, CD132). Exemplary sequences of IL-15 are provided in NG_029605.2. Disruption of IL-15 signaling may be useful, for example, in circumstances where it is desirable to generate a differentiated cell from a pluripotent stem cell, but with certain signaling pathways (e.g., IL-15) disrupted in the differentiated cell. IL-15 signaling can inhibit or decrease survival and/or activity of some types of differentiated cells, such as cells that may be useful for therapeutic applications. For example, IL-15 signaling is a negative regulator of natural killer (NK) cells.

[0191] CISH (encoded by the CISH gene) is downstream of the IL-15 receptor and can act as a negative regulator of IL-15 signaling in NK cells. As used herein, the term “CISH” refers to the Cytokine Inducible SH2 Containing Protein (see, e.g., Delconte et al., Nat Immunol. 2016 July; 17 (7): 816-24; exemplary sequences for CISH are set forth as NG_023194.1). In some embodiments, disruption of CISH regulation may increase activation of Jak/STAT pathways, leading to increased survival, proliferation and/or effector functions of NK cells. Thus, in some embodiments, genetically engineered NK cells (e.g., iNK cells, e.g., generated from genetically engineered hiPSCs comprising a disruption of CISH regulation) exhibit greater responsiveness to IL-15-mediated signaling than non-genetically engineered NK cells. In some such embodiments, genetically engineered NK cells exhibit greater effector function relative to non-genetically engineered NK cells.

[0192] In some embodiments, a genetically engineered NK cell, stem cell and/or progeny cell, additionally or alternatively, comprises a disruption and/or loss of function in one or more of B2M, NKG2A, PD1, TIGIT, ADORA2a, CIITA, HLA class II histocompatibility antigen alpha chain genes, HLA class II histocompatibility antigen beta chain genes, CD32B. or TRAC.

[0193] As used herein, the term “B2M” (B2 microglobulin) refers to a serum protein found in association with the major histocompatibility complex (MHC) class I heavy chain on the surface of nearly all nucleated cells. Exemplary sequences for B2M are set forth as NG_012920.2.

[0194] As used herein, the term “NKG2A” (natural killer group 2A) refers to a protein belonging to the killer cell lectin-like receptor family, also called NKG2 family, which is a group of transmembrane proteins preferentially expressed in NK cells. This family of proteins is characterized by the type II membrane orientation and the presence of a C-type lectin domain. See, e.g., Kamiya-T et al., J Clin Invest 2019 https://doi.org/10.1172/JCI123955. Exemplary sequences for NKG2A are set forth as AF461812.1.

[0195] As used herein, the term “PD1” (Programmed cell death protein 1), also known CD279 (cluster of differentiation 279), refers to a protein found on the surface of cells that has a role in regulating the immune system's response to the cells of the human body by down-regulating the immune system and promoting self-tolerance by suppressing T cell inflammatory activity. PD1 is an immune checkpoint and guards against autoimmunity. Exemplary sequences for PD1 are set forth as NM_005018.3.

[0196] As used herein, the term “TIGIT” (T cell immunoreceptor with Ig and ITIM domains) refers to a member of the PVR (poliovirus receptor) family of immunoglobulin proteins. The product of this gene is expressed on several classes of T cells including follicular B helper T cells (TFH). Exemplary sequences for TIGIT are set forth in NM_173799.4.

[0197] As used herein, the term “ADORA2A” refers to the adenosine A2a receptor, a member of the guanine nucleotide-binding protein (G protein)-coupled receptor (GPCR) superfamily, which is subdivided into classes and subtypes. This protein, an adenosine receptor of A2A subtype, uses adenosine as the preferred endogenous agonist and preferentially interacts with the G(s) and G (olf) family of G proteins to increase intracellular cAMP levels. Exemplary sequences of ADORA2a are provided in NG_052804.1.

[0198] As used herein, the term “CIITA” refers to the protein located in the nucleus that acts as a positive regulator of class II major histocompatibility complex gene transcription, and is referred to as the “master control factor” for the expression of these genes. The protein also binds GTP and uses GTP binding to facilitate its own transport into the nucleus. Mutations in this gene have been associated with bare lymphocyte syndrome type II (also known as hereditary MHC class II deficiency or HLA class II-deficient combined immunodeficiency), increased susceptibility to rheumatoid arthritis, multiple sclerosis, and possibly myocardial infarction. See, e.g., Chang et al., J Exp Med 180:1367-1374; and Chang et al., Immunity. 1996 February; 4 (2): 167-78, the entire contents of each of which are incorporated by reference herein. An exemplary sequence of CIITA is set forth as NG_009628.1.

[0199] In some embodiments, two or more HLA class II histocompatibility antigen alpha chain genes and/or two or more HLA class II histocompatibility antigen beta chain genes are disrupted, e.g., knocked out, e.g., by genomic editing. For example, in some embodiments, two or more HLA class II histocompatibility antigen alpha chain genes selected from HLA-DQA1, HLA-DRA, HLA-DPA1, HLA-DMA, HLA-DQA2, and HLA-DOA are disrupted, e.g., knocked out. For another example, in some embodiments, two or more HLA class II histocompatibility antigen beta chain genes selected from HLA-DMB, HLA-DOB, HLA-DPB1, HLA-DQB1, HLA-DQB3, HLA-DQB2, HLA-DRB1, HLA-DRB3, HLA-DRB4, and HLA-DRB5 are disrupted, e.g., knocked out. See, e.g., Crivello et al., J Immunol January 2019, ji1800257; DOI: https://doi.org/10.4049/jimmunol.1800257, the entire contents of which are incorporated herein by reference.

[0200] As used herein, the term “CD32B” (cluster of differentiation 32B) refers to a low affinity immunoglobulin gamma Fc region receptor II-b protein that, in humans, is encoded by the FCGR2B gene. See, e.g., Rankin-C T et al., Blood 2006 108(7): 2384-91, the entire contents of which are incorporated herein by reference.

[0201] As used herein, the term “TRAC” refers to the T-cell receptor alpha subunit (constant), encoded by the TRAC locus.

### Gain-of-Function Modifications

[0202] In some embodiments, a target cell described herein (e.g., a primary cell or a stem cell (e.g., iPSC) described herein) can additionally be genetically engineered to comprise a genetic modification that leads to expression of one or more gene products of interest described herein using, e.g., a gene-editing system, e.g., as described herein. In some such embodiments, a gene-editing system may be or comprise a CRISPR system, a zinc finger nuclease system, a TALEN, and/or a meganuclease.

[0203] In some embodiments, a cell is produced by a method of the present disclosure. e.g., a method that comprises contacting the cell with a nuclease that causes a break within an endogenous coding sequence of an essential gene in the cell wherein the essential gene encodes at least one gene product that is required for survival and/or proliferation of the cell. The cell is also contacted with a donor template that comprises a knock-in cassette comprising an exogenous coding sequence for a gene product of interest in frame with and downstream (3′) of an exogenous coding sequence or partial coding sequence of the essential gene. The knock-in cassette is integrated into the genome of the cell by homology-directed repair (HDR) of the break, resulting in a genome-edited cell that expresses the gene product of interest and the gene product encoded by the essential gene that is required for survival and/or proliferation of the cell, or a functional variant thereof. This is illustrated in FIG. 3 for an exemplary method. In some embodiments, a cell is contacted with a donor template that comprises a knock-in cassette comprising an exogenous coding sequence for a gene product of interest in frame with and upstream (5′) of an exogenous coding sequence or partial coding sequence of the essential gene.

[0204] In some embodiments, the cell comprises a genome with an exogenous coding sequence for a gene product of interest in frame with and downstream (3′) of a coding sequence of an essential gene, wherein the essential gene encodes a gene product that is required for survival and/or proliferation of the cell.

[0205] In some embodiments, the cell comprises a genome with an exogenous coding sequence for a gene product of interest in frame with and upstream (5′) of a coding sequence of an essential gene, wherein the essential gene encodes a gene product that is required for survival and/or proliferation of the cell.

[0206] In some embodiments, the cell comprises a genomic modification, wherein the genomic modification comprises an insertion of an exogenous knock-in cassette within an endogenous coding sequence of an essential gene in the cell's genome, wherein the essential gene encodes a gene product that is required for survival and/or proliferation of the cell, wherein the knock-in cassette comprises an exogenous coding sequence for a gene product of interest in frame with and downstream (3′) of an exogenous coding sequence or partial coding sequence encoding the gene product of the essential gene, or a functional variant thereof, and wherein the cell expresses the gene product of interest and the gene product encoded by the essential gene that is required for survival and/or proliferation of the cell, or a functional variant thereof. In some embodiments, the gene product of interest and the gene product encoded by the essential gene are expressed from the endogenous promoter of the essential gene.

### Donor Template

[0207] In one aspect the present disclosure provides a donor template comprising a knock-in cassette with an exogenous coding sequence for a gene product of interest in frame with and downstream (3′) of an exogenous coding sequence or partial coding sequence of an essential gene, wherein the essential gene encodes a gene product that is required for survival and/or proliferation of the cell.

[0208] In one aspect the present disclosure provides an impetus for designing donor templates comprising a knock-in cassette with an exogenous coding sequence for a gene product of interest in frame with and upstream (5′) of an exogenous coding sequence or partial coding sequence of an essential gene, wherein the essential gene encodes a gene product that is required for survival and/or proliferation of the cell; scc e.g., FIG. 3D.

[0209] In some embodiments, the donor template is for use in editing the genome of a cell by homology-directed repair (HDR).

[0210] Donor template design is described in detail in the literature, for instance in PCT Publication No. WO2016/073990A1. Donor templates can be single-stranded or double-stranded and can be used to facilitate HDR-based repair of double-strand breaks (DSBs), and are particularly useful for inserting a new sequence into the target sequence, or replacing the target sequence altogether. In some embodiments, the donor template is a donor DNA template. In some embodiments, a donor template is or is encompassed within a circular double-stranded DNA, e.g., a plasmid. In some embodiments, a donor template is or is encompassed within a circular ssDNA. In some embodiments, a donor template is or is encompassed within a linear double-stranded DNA (e.g., a plasmid that has been linearized). In some embodiments, a donor template is or is encompassed within a linear ssDNA. In some embodiments, a donor template is or is encompassed within a close-ended linear dsDNA. In some embodiments, a donor template is or is encompassed within a single stranded oligo donor (ssODN), for example, as a long multi-kb ssODN derived from m13 phage synthesis, or alternatively, short ssODNs, e.g., that comprise small genes of interest, tags, and/or probes. In some embodiments, a donor template is or is encompassed within a Doggybone™ DNA (dbDNA™). In some embodiments, a donor template is or is encompassed within a DNA minicircle. In some embodiments, a donor template can be delivered as an Integration-deficient Lentiviral Particle (IDLV). In some embodiments, a donor template is or is encompassed within a piggyBac™ or Sleeping Beauty sequence. In some embodiments, a donor template is or is encompassed within an RNA sequence, optionally used in conjunction with a reverse transcriptase to produce a DNA donor template.

[0211] Whether single-stranded or double stranded, donor templates generally include regions that are homologous to regions of DNA within or near (e.g., flanking or adjoining) a target sequence to be cleaved. These homologous regions are referred to herein as “homology arms,” and are illustrated schematically below relative to the knock-in cassette (which may be separated from one or both of the homology arms by additional spacer sequences that are not shown):
[0212] [5′ homology arm]-[knock-in cassette]-[3′ homology arm].

[0213] The homology arms can have any suitable length (including 0 nucleotides if only one homology arm is used), and 5′ and 3′ homology arms can have the same length, or can differ in length. The selection of appropriate homology arm lengths can be influenced by a variety of factors, such as the desire to avoid homologies or microhomologies with certain sequences such as Alu repeats or other very common elements. For example, a 5′ homology arm can be shortened to avoid a sequence repeat element. In other embodiments, a 3′ homology arm can be shortened to avoid a sequence repeat element. In some embodiments, both the 5′ and the 3′ homology arms can be shortened to avoid including certain sequence repeat elements.

[0214] In certain embodiments, the 5′ homology arm may be about 25 to about 1,000 base pairs in length, e.g., at least about 100, 200, 400, 600, or 800 base pairs in length. In certain embodiments, the 5′ homology arm comprises about 50 to 800 base pairs, e.g., 100 to 800, 200 to 800, 400 to 800, 400 to 600, or 600 to 800 base pairs. In certain embodiments, the 3′ homology arm may be about 25 to about 1,000 base pairs in length, e.g., at least about 100, 200, 400, 600, or 800 base pairs in length. In certain embodiments, the 3′ homology arm comprises about 50 to 800 base pairs, e.g., 100 to 800, 200 to 800, 400 to 800, 400 to 600, or 600 to 800 base pairs. In certain embodiments, the 5′ and 3′ homology arms are symmetrical in length. In certain embodiments, the 5′ and 3′ homology arms are asymmetrical in length.

[0215] In certain embodiments, a 5′ homology arm is less than about 3,000 base pairs, less than about 2,900 base pairs, less than about 2,800 base pairs, less than about 2,700 base pairs, less than about 2.600 base pairs, less than about 2.500 base pairs, less than about 2,400 base pairs, less than about 2,300 base pairs, less than about 2,200 base pairs, less than about 2.100 base pairs, less than about 2,000 base pairs, less than about 1,900 base pairs, less than about 1,800 base pairs, less than about 1,700 base pairs, less than about 1,600 base pairs, less than about 1,500 base pairs, less than about 1,400 base pairs, less than about 1,300 base pairs, less than about 1,200 base pairs, less than about 1,100 base pairs, less than about 1,000 base pairs, less than about 900 base pairs, less than about 800 base pairs, less than about 700 base pairs, less than about 600 base pairs, less than about 500 base pairs, or less than about 400 base pairs.

[0216] In certain embodiments, a 3′ homology arm is less than about 3,000 base pairs, less than about 2,900 base pairs, less than about 2,800 base pairs, less than about 2,700 base pairs, less than about 2.600 base pairs, less than about 2,500 base pairs, less than about 2,400 base pairs, less than about 2.300 base pairs, less than about 2,200 base pairs, less than about 2,100 base pairs, less than about 2,000 base pairs, less than about 1,900 base pairs, less than about 1,800 base pairs, less than about 1,700 base pairs, less than about 1,600 base pairs, less than about 1,500 base pairs, less than about 1,400 base pairs, less than about 1,300 base pairs, less than about 1,200 base pairs, less than about 1,100 base pairs, less than 1,000 base pairs, less than about 900 base pairs, less than about 800 base pairs, less than about 700 base pairs, less than about 600 base pairs, less than about 500 base pairs, or less than about 400 base pairs.

[0217] In certain embodiments, the 5′ and 3′ homology arms flank the break and are less than 100, 75, 50, 25, 15, 10 or 5 base pairs away from an edge of the break. In certain embodiments, the 5′ and 3′ homology arms flank an endogenous stop codon. In certain embodiments, the 5′ and 3′ homology arms flank a break located within about 500 base pairs (e.g., about 500 base pairs, about 450 base pairs, about 400 base pairs, about 350 base pairs, about 300 base pairs, about 250 base pairs, about 200 base pairs, about 150 base pairs, about 100 base pairs, about 50 base pairs, or about 25 base pairs) upstream (5′) of an endogenous stop codon, e.g., the stop codon of an essential gene. In certain embodiments, the 5′ homology arm encompasses an edge of the break.

### Knock-In Cassette

[0218] In some embodiments, the knock-in cassette within the donor template comprises an exogenous coding sequence for the gene product of interest in frame with and downstream (3′) of an exogenous coding sequence or partial coding sequence of the essential gene. In some embodiments, a knock-in cassette within a donor template comprises an exogenous coding sequence for the gene product of interest in frame with and upstream (5′) of an exogenous coding sequence or partial coding sequence of an essential gene. In some embodiments, the knock-in cassette is a polycistronic knock-in cassette. In some embodiments, the knock-in cassette is a bicistronic knock-in cassette. In some embodiment the knock-in cassette does not comprise a reporter gene, e.g., a fluorescent reporter gene or an antibiotic resistance gene.

[0219] In some embodiments, a single essential gene locus will be targeted by two knock-in cassettes comprising different “cargo” sequences. In some embodiments, one allele will incorporate one knock-in cassette, while the other allele will incorporate the other knock-in cassette. In some embodiments, a gRNA utilized to generate an appropriate DNA break may be the same for each of the two different knock-in cassettes. In some embodiments, gRNAs utilized to generate appropriate DNA breaks for each of the two different knock-in cassettes may be different, such that the “cargo” sequence is incorporated at a different position for each allele. In some embodiments, such a different position for each allele may still be within the ultimate exons coding region. In some embodiments, such a different position for each allele may be within the penultimate exon (second to last), and/or ultimate (last) exons coding region. In some embodiments, such a different position for at least one of the alleles may be within the first exon. In some embodiments, such a different position for at least one of the alleles may be within the first or second exon.

[0220] In order to properly restore the essential gene coding region in the genetically modified cell (so that a functioning gene product is produced) the knock-in cassette does not need to comprise an exogenous coding sequence that corresponds to the entire coding sequence of the essential gene. Indeed, depending on the location of the break in the endogenous coding sequence of the essential gene it may be possible to restore the essential gene by providing a knock-in cassette that comprises a partial coding sequence of the essential gene. e.g., that corresponds to a portion of the endogenous coding sequence of the essential gene that spans the break and the entire region downstream of the break (minus the stop codon), and/or that corresponds to a portion of the endogenous coding sequence of the essential gene that spans the break and the entire region upstream of the break (up to and optionally including the start codon).

[0221] In order to minimize the size of the knock-in cassette it may in fact be advantageous, in some embodiments, to have the break located within the last 1500, 1000, 750, 500, 400, 300, 200, 100, or 50 base pairs of the endogenous coding sequence of the essential gene, i.e., towards the 3′ end of the coding sequence. In some embodiments, a base pair's location in a coding sequence may be defined 3′-to-5′ from an endogenous translational stop signal (e.g., a stop codon). In some embodiments, as used herein, an “endogenous coding sequence” can include both exonic and intronic base pairs, and refers to gene sequence occurring 5′ to an endogenous functional translational stop signal. In some embodiments, a break within an endogenous coding sequence comprises a break within one DNA strand. In some embodiments, a break within an endogenous coding sequence comprises a break within both DNA strands. In some embodiments, a break is located within the last 1000 base pairs of the endogenous coding sequence. In some embodiments, a break is located within the last 750 base pairs of the endogenous coding sequence. In some embodiments, a break is located within the last 600 base pairs of the endogenous coding sequence. In some embodiments, a break is located within the last 500 base pairs of the endogenous coding sequence. In some embodiments, a break is located within the last 400 base pairs of the endogenous coding sequence. In some embodiments, a break is located within the last 300 base pairs of the endogenous coding sequence. In some embodiments, a break is located within the last 250 base pairs of the endogenous coding sequence. In some embodiments, a break is located within the last 200 base pairs of the endogenous coding sequence. In some embodiments, a break is located within the last 150 base pairs of the endogenous coding sequence. In some embodiments, a break is located within the last 100 base pairs of the endogenous coding sequence. In some embodiments, a break is located within the last 75 base pairs of the endogenous coding sequence. In some embodiments, a break is located within the last 50 base pairs of the endogenous coding sequence. In some embodiments, a break is located within the last 21 base pairs of the endogenous coding sequence.

[0222] In some embodiments, the exogenous partial coding sequence of the essential gene in the knock-in cassette encodes a C-terminal fragment of a protein encoded by the essential gene, e.g., a fragment that is less than 500, 250, 150, 125, 100, 75, 50, 25, 20, 15 or 10 amino acids in length. In some embodiments, the exogenous partial coding sequence of the essential gene in the knock-in cassette is codon optimized. In some embodiments, the exogenous partial coding sequence of the essential gene in the knock-in cassette is codon optimized to eliminate at least one PAM site. In some embodiments, the exogenous partial coding sequence of the essential gene in the knock-in cassette is codon optimized to eliminate more than one PAM site. In some embodiments, the exogenous partial coding sequence of the essential gene in the knock-in cassette is codon optimized to eliminate all relevant nuclease specific PAM sites. In some embodiments, a C-terminal fragment of a protein encoded by the essential gene is about 140 amino acids in length. In some embodiments, a C-terminal fragment of a protein encoded by the essential gene is about 130 amino acids in length. In some embodiments, a C-terminal fragment of a protein encoded by the essential gene is about 120 amino acids in length. In some embodiments, the C-terminal fragment includes an amino acid sequence that is encoded by a region of the endogenous coding sequence of the essential gene that spans the break. In some embodiments, a C-terminal fragment includes an amino acid sequence that is encoded by a region of the endogenous coding sequence within 1 exon of the essential gene. In some embodiments, a C-terminal fragment includes an amino acid sequence that is encoded by a region of the endogenous coding sequence within 2 exons of the essential gene. In some embodiments, a C-terminal fragment includes an amino acid sequence that is encoded by a region of the endogenous coding sequence within 3 exons of the essential gene. In some embodiments, a C-terminal fragment includes an amino acid sequence that is encoded by a region of the endogenous coding sequence within 4 exons of the essential gene. In some embodiments, a C-terminal fragment includes an amino acid sequence that is encoded by a region of the endogenous coding sequence within 5 exons of the essential gene.

[0223] In some embodiments, the exogenous partial coding sequence of an essential gene in a knock-in cassette encodes a C-terminal fragment of a protein encoded by an essential gene, e.g., a fragment that is less than 500, 250, 150, 125, 100, 75, 50, 25, 20, 19, 18, 17, 16, 15, 14, 13, 12, 11, 10, 9, 8, or 7 amino acids in length. In some embodiments, the exogenous partial coding sequence of an essential gene in a knock-in cassette encodes a 20 amino acid C-terminal fragment of a protein encoded by an essential gene. In some embodiments, the exogenous partial coding sequence of an essential gene in a knock-in cassette encodes a 19 amino acid C-terminal fragment of a protein encoded by an essential gene. In some embodiments, the exogenous partial coding sequence of an essential gene in a knock-in cassette encodes an 18 amino acid C-terminal fragment of a protein encoded by an essential gene. In some embodiments, the exogenous partial coding sequence of an essential gene in a knock-in cassette encodes a 17 amino acid C-terminal fragment of a protein encoded by an essential gene. In some embodiments, the exogenous partial coding sequence of an essential gene in a knock-in cassette encodes a 16 amino acid C-terminal fragment of a protein encoded by an essential gene. In some embodiments, the exogenous partial coding sequence of an essential gene in a knock-in cassette encodes a 1 amino acid C-terminal fragment of a protein encoded by an essential gene.

[0224] In some embodiments, e.g., when the essential gene includes many exons as shown in the exemplary method of FIG. 3A, it may be advantageous to have the break within the last exon of the essential gene. In some embodiments, e.g., when the essential gene includes many exons as shown in the exemplary method of FIG. 3A, it may be advantageous to have the break within the penultimate exon of the essential gene. It is to be understood however that the present disclosure is not limited to any particular location for the break and that the available positions will vary depending on the nature and length of the essential gene and the length of the exogenous coding sequence for the gene product of interest. For example, for essential genes that include a few exons or when the gene product of interest is small it may be possible to locate the break in an upstream exon.

[0225] In order to minimize the size of the knock-in cassette it may in fact be advantageous, in some embodiments, to have the break located within the first 1500, 1000, 750, 500, 400, 300, 200, 100, or 50 base pairs of an endogenous coding sequence of the essential gene, i.e., starting from the 5′ end of a coding sequence. In some embodiments, a base pair's location in a coding sequence may be defined 5′-to-3′ from an endogenous translational start signal (e.g., a start codon). In some embodiments, as used herein, an “endogenous coding sequence” can include both exonic and intronic base pairs, and refers to gene sequence occurring 3′ to an endogenous functional translational start signal. In some embodiments, a break within an endogenous coding sequence comprises a break within one DNA strand. In some embodiments, a break within an endogenous coding sequence comprises a break within both DNA strands. In some embodiments, a break is located within the first 1000 base pairs of the endogenous coding sequence. In some embodiments, a break is located within the first 750 base pairs of an endogenous coding sequence. In some embodiments, a break is located within the first 600 base pairs of the endogenous coding sequence. In some embodiments, a break is located within the first 500 base pairs of the endogenous coding sequence. In some embodiments, a break is located within the first 400 base pairs of the endogenous coding sequence. In some embodiments, a break is located within the first 300 base pairs of the endogenous coding sequence. In some embodiments, a break is located within the first 250 base pairs of the endogenous coding sequence. In some embodiments, a break is located within the first 200 base pairs of the endogenous coding sequence. In some embodiments, a break is located within the first 150 base pairs of the endogenous coding sequence. In some embodiments, a break is located within the first 100 base pairs of the endogenous coding sequence. In some embodiments, a break is located within the first 75 base pairs of the endogenous coding sequence. In some embodiments, a break is located within the first 50 base pairs of the endogenous coding sequence. In some embodiments, a break is located within the first 21 base pairs of the endogenous coding sequence.

[0226] In some embodiments, the exogenous partial coding sequence of the essential gene in the knock-in cassette encodes an N-terminal fragment of a protein encoded by the essential gene, e.g., a fragment that is less than 500, 250, 150, 125, 100, 75, 50, 25, 20, 15 or 10 amino acids in length. In some embodiments, an N-terminal fragment of a protein encoded by the essential gene is about 140 amino acids in length. In some embodiments, an N-terminal fragment of a protein encoded by the essential gene is about 130 amino acids in length. In some embodiments, an N-terminal fragment of a protein encoded by the essential gene is about 120 amino acids in length. In some embodiments, an N-terminal fragment includes an amino acid sequence that is encoded by a region of the endogenous coding sequence of the essential gene that spans the break. In some embodiments, an N-terminal fragment includes an amino acid sequence that is encoded by a region of the endogenous coding sequence within 1 exon of the essential gene. In some embodiments, an N-terminal fragment includes an amino acid sequence that is encoded by a region of the endogenous coding sequence within 2 exons of the essential gene. In some embodiments, an N-terminal fragment includes an amino acid sequence that is encoded by a region of the endogenous coding sequence within 3 exons of the essential gene. In some embodiments, an N-terminal fragment includes an amino acid sequence that is encoded by a region of the endogenous coding sequence within 4 exons of the essential gene. In some embodiments, an N-terminal fragment includes an amino acid sequence that is encoded by a region of the endogenous coding sequence within 5 exons of the essential gene.

[0227] In some embodiments, the exogenous partial coding sequence of an essential gene in a knock-in cassette encodes an N-terminal fragment of a protein encoded by an essential gene, e.g., a fragment that is less than 500, 250, 150, 125, 100, 75, 50, 25, 20, 19, 18, 17, 16, 15, 14, 13, 12, 11, 10, 9, 8, or 7 amino acids in length. In some embodiments, the exogenous partial coding sequence of an essential gene in a knock-in cassette encodes a 20 amino acid N-terminal fragment of a protein encoded by an essential gene. In some embodiments, the exogenous partial coding sequence of an essential gene in a knock-in cassette encodes a 19 amino acid N-terminal fragment of a protein encoded by an essential gene. In some embodiments, the exogenous partial coding sequence of an essential gene in a knock-in cassette encodes an 18 amino acid N-terminal fragment of a protein encoded by an essential gene. In some embodiments, the exogenous partial coding sequence of an essential gene in a knock-in cassette encodes a 17 amino acid N-terminal fragment of a protein encoded by an essential gene. In some embodiments, the exogenous partial coding sequence of an essential gene in a knock-in cassette encodes a 16 amino acid N-terminal fragment of a protein encoded by an essential gene. In some embodiments, the exogenous partial coding sequence of an essential gene in a knock-in cassette encodes a 1 amino acid N-terminal fragment of a protein encoded by an essential gene.

[0228] In some embodiments, the exogenous coding sequence or partial coding sequence of the essential gene in the knock-in cassette is less than 100% identical to the corresponding endogenous coding sequence of the essential gene of the cell, e.g., less than 99%, 98%. 97%, 96%, 95%, 94%, 93%, 92%, 91%, 90%, 85%, 80%, 75%, 70%, 65%, 60%, 55% or less than 50% (i.e., when the two sequences are aligned using a standard pairwise sequence alignment tool that maximizes the alignment between the corresponding sequences). For example, in some embodiments, the exogenous coding sequence or partial coding sequence of the essential gene in the knock-in cassette is codon optimized relative to the corresponding endogenous coding sequence of the essential gene of the cell, e.g., to prevent further binding of a nuclease to the target site. Alternatively or additionally it may be codon optimized to reduce the likelihood of recombination after integration of the knock-in cassette into the genome of the cell and/or to increase expression of the gene product of the essential gene and/or the gene product of interest after integration of the knock-in cassette into the genome of the cell.

[0229] In some embodiments, a knock-in cassette comprises one or more nucleotides or base pairs that differ (e.g., are mutations) relative to an endogenous knock-in site. In some embodiments, such mutations in a knock-in cassette provide resistance to cutting by a nuclease. In some embodiments, such mutations in a knock-in cassette prevent a nuclease from cutting the target loci following homologous recombination. In some embodiments, such mutations in a knock-in cassette occur within one or more coding and/or non-coding regions of a target gene. In some embodiments, such mutations in a knock-in cassette are silent mutations. In some embodiments, such mutations in a knock-in cassette are silent and/or missense mutations.

[0230] In some embodiments, such mutations in a knock-in cassette occur within a target protospacer motif and/or a target protospacer adjacent motif (PAM) site. In some embodiments, a knock-in cassette includes a target protospacer motif and/or a PAM site that are saturated with silent mutations. In some embodiments, a knock-in cassette includes a target protospacer motif and/or a PAM site that are approximately 30%, 40%, 50%, 60%, 70%, 80%, or 90% saturated with silent mutations. In some embodiments, a knock-in cassette includes a target protospacer motif and/or a PAM site that are saturated with silent and/or missense mutations. In some embodiments, a knock-in cassette includes a target protospacer motif and/or a PAM site that comprise at least one mutation, at least 2 mutations, at least 3 mutations, at least 4 mutations, at least 5 mutations, at least 6 mutations, at least 7 mutations, at least 8 mutations, at least 9 mutations, at least 10 mutations, at least 11 mutations, at least 12 mutations, at least 13 mutations, at least 14 mutations, or at least 15 mutations.

[0231] In some embodiments, certain codons encoding certain amino acids in a target site cannot be mutated through codon-optimization without losing some portion of an endogenous proteins natural function. In some embodiments, certain codons encoding certain amino acids in a target site cannot be mutated through codon-optimization.

[0232] In some embodiments, the knock-in cassette is codon optimized in only a portion of the coding sequence. For example, in some embodiments, a knock-in cassette encodes a C-terminal fragment of a protein encoded by an essential gene, e.g., a fragment that is less than 500, 250, 150, 125, 100, 75, 50, 25, 20, 19, 18, 17, 16, 15, 14, 13, 12, 11, 10, 9, 8, or 7 amino acids in length. In some embodiments, the exogenous partial coding sequence of an essential gene in a knock-in cassette that has been codon optimized encodes a 20 amino acid C-terminal fragment of a protein encoded by an essential gene. In some embodiments, the exogenous partial coding sequence of an essential gene in a knock-in cassette that has been codon optimized encodes a 19 amino acid C-terminal fragment of a protein encoded by an essential gene. In some embodiments, the exogenous partial coding sequence of an essential gene in a knock-in cassette that has been codon optimized encodes an 18 amino acid C-terminal fragment of a protein encoded by an essential gene. In some embodiments, the exogenous partial coding sequence of an essential gene in a knock-in cassette that has been codon optimized encodes a 17 amino acid C-terminal fragment of a protein encoded by an essential gene. In some embodiments, the exogenous partial coding sequence of an essential gene in a knock-in cassette that has been codon optimized encodes a 16 amino acid C-terminal fragment of a protein encoded by an essential gene. In some embodiments, the exogenous partial coding sequence of an essential gene in a knock-in cassette that has been codon optimized encodes a 15 amino acid C-terminal fragment of a protein encoded by an essential gene. In some embodiments, the exogenous partial coding sequence of an essential gene in a knock-in cassette that has been codon optimized encodes a 14 amino acid C-terminal fragment of a protein encoded by an essential gene. In some embodiments, the exogenous partial coding sequence of an essential gene in a knock-in cassette that has been codon optimized encodes a 13 amino acid C-terminal fragment of a protein encoded by an essential gene. In some embodiments, the exogenous partial coding sequence of an essential gene in a knock-in cassette that has been codon optimized encodes a 12 amino acid C-terminal fragment of a protein encoded by an essential gene. In some embodiments, the exogenous partial coding sequence of an essential gene in a knock-in cassette that has been codon optimized encodes a 11 amino acid C-terminal fragment of a protein encoded by an essential gene. In some embodiments, the exogenous partial coding sequence of an essential gene in a knock-in cassette that has been codon optimized encodes a 10 amino acid C-terminal fragment of a protein encoded by an essential gene. In some embodiments, the exogenous partial coding sequence of an essential gene in a knock-in cassette that has been codon optimized encodes a 9 amino acid C-terminal fragment of a protein encoded by an essential gene. In some embodiments, the exogenous partial coding sequence of an essential gene in a knock-in cassette that has been codon optimized encodes an 8 amino acid C-terminal fragment of a protein encoded by an essential gene. In some embodiments, the exogenous partial coding sequence of an essential gene in a knock-in cassette that has been codon optimized encodes a 7 amino acid C-terminal fragment of a protein encoded by an essential gene. In some embodiments, the exogenous partial coding sequence of an essential gene in a knock-in cassette that has been codon optimized encodes a 6 amino acid C-terminal fragment of a protein encoded by an essential gene. In some embodiments, the exogenous partial coding sequence of an essential gene in a knock-in cassette that has been codon optimized encodes a 5 amino acid C-terminal fragment of a protein encoded by an essential gene. In some embodiments, the exogenous partial coding sequence of an essential gene in a knock-in cassette that has been codon optimized encodes an amino acid C-terminal fragment that is less than 5 amino acids of a protein encoded by an essential gene.

[0233] In some embodiments, the knock-in cassette is codon optimized in only a portion of the coding sequence. For example, in some embodiments, a knock-in cassette encodes an N-terminal fragment of a protein encoded by an essential gene, e.g., a fragment that is less than 500, 250, 150, 125, 100, 75, 50, 25, 20, 19, 18, 17, 16, 15, 14, 13, 12, 11, 10, 9, 8, or 7 amino acids in length. In some embodiments, the exogenous partial coding sequence of an essential gene in a knock-in cassette that has been codon optimized encodes a 20 amino acid N-terminal fragment of a protein encoded by an essential gene. In some embodiments, the exogenous partial coding sequence of an essential gene in a knock-in cassette that has been codon optimized encodes a 19 amino acid N-terminal fragment of a protein encoded by an essential gene. In some embodiments, the exogenous partial coding sequence of an essential gene in a knock-in cassette that has been codon optimized encodes an 18 amino acid N-terminal fragment of a protein encoded by an essential gene. In some embodiments, the exogenous partial coding sequence of an essential gene in a knock-in cassette that has been codon optimized encodes a 17 amino acid N-terminal fragment of a protein encoded by an essential gene. In some embodiments, the exogenous partial coding sequence of an essential gene in a knock-in cassette that has been codon optimized encodes a 16 amino acid N-terminal fragment of a protein encoded by an essential gene. In some embodiments, the exogenous partial coding sequence of an essential gene in a knock-in cassette that has been codon optimized encodes a 15 amino acid N-terminal fragment of a protein encoded by an essential gene. In some embodiments, the exogenous partial coding sequence of an essential gene in a knock-in cassette that has been codon optimized encodes a 14 amino acid N-terminal fragment of a protein encoded by an essential gene. In some embodiments, the exogenous partial coding sequence of an essential gene in a knock-in cassette that has been codon optimized encodes a 13 amino acid N-terminal fragment of a protein encoded by an essential gene. In some embodiments, the exogenous partial coding sequence of an essential gene in a knock-in cassette that has been codon optimized encodes a 12 amino acid N-terminal fragment of a protein encoded by an essential gene. In some embodiments, the exogenous partial coding sequence of an essential gene in a knock-in cassette that has been codon optimized encodes a 11 amino acid N-terminal fragment of a protein encoded by an essential gene. In some embodiments, the exogenous partial coding sequence of an essential gene in a knock-in cassette that has been codon optimized encodes a 10 amino acid N-terminal fragment of a protein encoded by an essential gene. In some embodiments, the exogenous partial coding sequence of an essential gene in a knock-in cassette that has been codon optimized encodes a 9 amino acid N-terminal fragment of a protein encoded by an essential gene. In some embodiments, the exogenous partial coding sequence of an essential gene in a knock-in cassette that has been codon optimized encodes an 8 amino acid N-terminal fragment of a protein encoded by an essential gene. In some embodiments, the exogenous partial coding sequence of an essential gene in a knock-in cassette that has been codon optimized encodes a 7 amino acid N-terminal fragment of a protein encoded by an essential gene. In some embodiments, the exogenous partial coding sequence of an essential gene in a knock-in cassette that has been codon optimized encodes a 6 amino acid N-terminal fragment of a protein encoded by an essential gene. In some embodiments, the exogenous partial coding sequence of an essential gene in a knock-in cassette that has been codon optimized encodes a 5 amino acid N-terminal fragment of a protein encoded by an essential gene. In some embodiments, the exogenous partial coding sequence of an essential gene in a knock-in cassette that has been codon optimized encodes an amino acid N-terminal fragment that is less than 5 amino acids of a protein encoded by an essential gene.

[0234] In some embodiments, the knock-in cassette comprises one or more sequences encoding a linker peptide, e.g., between an exogenous coding sequence or partial coding sequence of the essential gene and a “cargo” sequence and/or a regulatory element described herein. Such linker peptides are known in the art, any of which can be included in a knock-in cassette described herein. In some embodiments, the linker peptide comprises the amino acid sequence GSG.

[0235] In some embodiments, the knock-in cassette comprises other regulatory elements such as a polyadenylation sequence, and optionally a 3′ UTR sequence, downstream of the exogenous coding sequence for the gene product of interest. If a 3′UTR sequence is present, the 3′L′TR sequence is positioned 3′ of the exogenous coding sequence and 5′ of the polyadenylation sequence.

[0236] In some embodiments, the knock-in cassette comprises other regulatory elements such as a 5′ UTR and a start codon, upstream of the exogenous coding sequence for the gene product of interest. If a 5′UTR sequence is present, the 5′UTR sequence is positioned 5′ of the “cargo” sequence and/or exogenous coding sequence.

### Exemplary Homology Arms (HA)

[0237] In certain embodiments, a donor template comprises a 5′ and/or 3′ homology arm homologous to region of a GAPDH locus. In some embodiments, a donor template comprises a 5′ homology arm comprising or consisting of the sequence of SEQ ID NO: 1, 2, or 3. In some embodiments, a 5′ homology arm comprises or consists of a sequence that is at least 85%, 90%, 95%, 98% or 99% identical to the sequence of SEQ ID NO: 1, 2, or 3. In some embodiments, a donor template comprises a 3′ homology arm comprising or consisting of the sequence of SEQ ID NO: 4 or 5. In certain embodiments, a 3′ homology arm comprises or consists of a sequence that is at least 85%, 90%, 95%, 98% or 99% identical to the sequence of SEQ ID NO: 4 or 5.

[0238] In some embodiments, a donor template comprises a 5′ homology arm comprising SEQ ID NO: 1, and a 3′ homology arm comprising SEQ ID NO: 4. In some embodiments, a donor template comprises a 5′ homology arm comprising SEQ ID NO: 2, and a 3′ homology arm comprising SEQ ID NO: 4. In some embodiments, a donor template comprises a 5′ homology arm comprising SEQ ID NO: 3, and a 3′ homology arm comprising SEQ ID NO: 5.

[0239] In some embodiments, a stretch of sequence flanking a nuclease cleavage site may be duplicated in both a 5′ and 3′ homology arm. In some embodiments, such a duplication is designed to optimize HDR efficiency. In some embodiments, one of the duplicated sequences may be codon optimized, while the other sequence is not codon optimized. In some embodiments, both of the duplicated sequences may be codon optimized. In some embodiments, codon optimization may remove a target PAM site. In some embodiments, a duplicated sequence may be no more than: 100 bp in length, 90 bp in length, 80 bp in length, 70 bp in length, 60 bp in length, 50 bp in length, 40 bp in length, 30 bp in length, or 20 bp in length.

exemplary 5′ HA for knock-in cassette insertion at GAPDH locus
SEQ ID NO: 1
GAAGACTGTGGATGGCCCCTCCGGGAAACTGTGGCGTGATGGCCGCGGGGCTCTCCAGAACATC
ATCCCTGCCTCTACTGGCGCTGCCAAGGCTGTGGGCAAGGTCATCCCTGAGCTGAACGGGAAGC
TCACTGGCATGGCCTTCCGTGTCCCCACTGCCAACGTGTCAGTGGTGGACCTGACCTGCCGTCT
AGAAAAACCTGCCAAATATGATGACATCAAGAAGGTGGTGAAGCAGGCGTCGGAGGGCCCCCTC
AAGGGCATCCTGGGCTACACTGAGCACCAGGTGGTCTCCTCTGACTTCAACAGCGACACCCACT
CCTCCACCTTTGACGCTGGGGCTGGCATTGCCCTCAACGACCACTTTGTCAAGCTCATTTCCTG
GTATGTGGCTGGGGCCAGAGACTGGCTCTTAAAAAGTGCAGGGTCTGGCGCCCTCTGGTGGCTG
GCTCAGAAAAAGGGCCCTGACAACTCTTTACATCTTCTAGGTATGACAACGAGTTCGGATATAG
CAATAGAGTGGTCGATCTGATGGCTCATATGGCTAGCAAAGAG
exemplary 5′ HA for knock-in cassette insertion at GAPDH locus
SEQ ID NO: 2
GAAGACTGTGGATGGCCCCTCCGGGAAACTGTGGCGTGATGGCCGCGGGGCTCTCCAGAACATC
ATCCCTGCCTCTACTGGCGCTGCCAAGGCTGTGGGCAAGGTCATCCCTGAGCTGAACGGGAAGC
TCACTGGCATGGCCTTCCGTGTCCCCACTGCCAACGTGTCAGTGGTGGACCTGACCTGCCGTCT
AGAAAAACCTGCCAAATATGATGACATCAAGAAGGTGGTGAAGCAGGCGTCGGAGGGCCCCCTC
AAGGGCATCCTGGGCTACACTGAGCACCAGGTGGTCTCCTCTGACTTCAACAGCGACACCCACT
CCTCCACCTTTGACGCTGGGGCTGGCATTGCCCTCAACGACCACTTTGTCAAGCTCATTTCCTG
GTATGTGGCTGGGGCCAGAGACTGGCTCTTAAAAAGTGCAGGGTCTGGCGCCCTCTGGTGGCTG
GCTCAGAAAAAGGGCCCTGACAACTCTTTACATCTTCTAGGTATGACAACGAGTTCGGATATAG
CAATAGAGTGGTCGATCTGATGGCTCATATGGCTAGCAAAGAGGGAAGCGGAGCTACTAACTTC
AGCCTGCTGAAGCAGGCTGGAGACGTGGAGGAGAACCCTGGACCT
exemplary 5′ HA for knock-in cassette insertion at GAPDH locus
SEQ ID NO: 3
GGCTTTCCCATAATTTCCTTTCAAGGTGGGGAGGGAGGTAGAGGGGTGATGTGGGGAGTACGCT
GCAGGGCCTCACTCCTTTTGCAGACCACAGTCCATGCCATCACTGCCACCCAGAAGACTGTGGA
TGGCCCCTCCGGGAAACTGTGGCGTGATGGCCGCGGGGCTCTCCAGAACATCATCCCTGCCTCT
ACTGGCGCTGCCAAGGCTGTGGGCAAGGTCATCCCTGAGCTGAACGGGAAGCTCACTGGCATGG
CCTTCCGTGTCCCCACTGCCAACGTGTCAGTGGTGGACCTGACCTGCCGTCTAGAAAAACCTGC
CAAATATGATGACATCAAGAAGGTGGTGAAGCAGGCGTCGGAGGGCCCCCTCAAGGGCATCCTG
GGCTACACTGAGCACCAGGTGGTCTCCTCTGACTTCAACAGCGACACCCACTCCTCCACCTTTG
ACGCTGGGGCTGGCATTGCCCTCAACGACCACTTTGTCAAGCTCATCTCTTGGTACGACAATGA
GTTCGGATATAGCAATAGAGTGGTCGATCTGATGGCTCATATGGCTAGCAAAGAG
exemplary 3′ HA for knock-in cassette insertion at GAPDH locus
SEQ ID NO: 4
ATTTGGCTACAGCAACAGGGTGGTGGACCTCATGGCCCACATGGCCTCCAAGGAGTAAGACCCC
TGGACCACCAGCCCCAGCAAGAGCACAAGAGGAAGAGAGAGACCCTCACTGCTGGGGAGTCCCT
GCCACACTCAGTCCCCCACCACACTGAATCTCCCCTCCTCACAGTTGCCATGTAGACCCCTTGA
AGAGGGGAGGGGCCTAGGGAGCCGCACCTTGTCATGTACCATCAATAAAGTACCCTGTGCTCAA
CCAGTTACTTGTCCTGTCTTATTCTAGGGTCTGGGGCAGAGGGGAGGGAAGCTGGGCTTGTGTC
AAGGTGAGACATTCTTGCTGGGGAGGGACCTGGTATGTTCTCCTCAGACTGAGGGTAGGGCCTC
CAAACAGCCTTGCTTGCTTCGAGAACCATTTGCTTCCCGCTCAGACGTCTTGAGTGCTACAGGA
AGCTGGCACCACTACTTCAGAGAACAAGGCCTTTTCCTCTCCTCGCTCCAGT
exemplary 3′ HA for knock-in cassette insertion at GAPDH locus
SEQ ID NO: 5
AGACTGGCTCTTAAAAAGTGCAGGGTCTGGCGCCCTCTGGTGGCTGGCTCAGAAAAAGGGCCCT
GACAACTCTTTTCATCTTCTAGGTATGACAACGAATTTGGCTACAGCAACAGGGTGGTGGACCT
CATGGCCCACATGGCCTCCAAGGAGTAAGACCCCTGGACCACCAGCCCCAGCAAGAGCACAAGA
GGAAGAGAGAGACCCTCACTGCTGGGGAGTCCCTGCCACACTCAGTCCCCCACCACACTGAATC
TCCCCTCCTCACAGTTGCCATGTAGACCCCTTGAAGAGGGGAGGGGCCTAGGGAGCCGCACCTT
GTCATGTACCATCAATAAAGTACCCTGTGCTCAACCAGTTACTTGTCCTGTCTTATTCTAGGGT
CTGGGGCAGAGGGGAGGGAAGCTGGGCTTGTGTCAAGGTGAGACATTCTTGCTGGGGAGGGACC
TGGTATGTTCTCCTCAGACTGAGGGTAGGGCCTCCAAACAGCCTTGCTTGCT

[0240] In some embodiments, a donor template comprises a 5′ and/or 3′ homology arm homologous to a region of a TBP locus. In some embodiments, a donor template comprises a 5′ homology arm comprising or consisting of the sequence of SEQ ID NO:6, 7, or 8. In some embodiments, a 5′ homology arm comprises or consists of a sequence that is at least 85%, 90%, 95%, 98% or 99% identical to the sequence of SEQ ID NO: 6, 7, or 8. In some embodiments, a donor template comprises a 3′ homology arm comprising or consisting of the sequence of SEQ ID NO: 9, 10, or 11. In certain embodiments, a 3′ homology arm comprises or consists of a sequence that is at least 85%, 90%, 95%, 98% or 99% identical to the sequence of SEQ ID NO: 9, 10, or 11.

[0241] In some embodiments, a donor template comprises a 5′ homology arm comprising SEQ ID NO: 6, and a 3′ homology arm comprising SEQ ID NO: 9. In some embodiments, a donor template comprises a 5′ homology arm comprising SEQ ID NO: 7, and a 3′ homology arm comprising SEQ ID NO: 10. In some embodiments, a donor template comprises a 5′ homology arm comprising SEQ ID NO: 8, and a 3′ homology arm comprising SEQ ID NO: 11.

exemplary 5′ HA for knock-in cassette insertion at TBP locus
SEQ ID NO: 6
GCAGACTTCCATTTACAGTGAGGAGGTGAGCATTGCATTGAACAAAAGATGGCGTTTTCACTTG
GAATTAGTTATCTGAAGCTTTAGGATTCCTCAGCAATATGATTATGAGACAAGAAAGGAAGATT
CAGAAATGAGTCTAGITGAAGGCAGCAATTCAGAGAAGAAGATTCAGTIGTTATCATTGCCGTC
CTGCTTGGTTTATGGCCTGGTTCAGGACCAAGGAGAGAAGTGTGAATACATGCCTCTTGAGCTA
TAGAATGAGACGCTGGAGTCACTAAGATGATTTTTTAAAAGTATTGTTTTATAAACAAAAATAA
GATTGTGACAAGGGATTCCACTATTAATGTTTTCATGCCTGTGCCTTAATCTGACTGGGTATGG
TGAGAATTGTGCTTGCAGCTTTAAGGTAAGAATTTTACCATCTTAATATGTTAAGAAGTGCCAT
TTCAGTCTCTCATCTCTACTCCAACTTGTCTTCTTAGGTGCTAAAGTCAGAGCCGAAATCTACG
AGGCCTTCGAGAACATCTACCCCATCCTGAAGGGCTTCAGAAAGACCACC
exemplary 5′ HA for knock-in cassette insertion at TBP locus
SEQ ID NO: 7
CTGACCACAGCTCTGCAAGCAGACTTCCATTTACAGTGAGGAGGTGAGCATTGCATTGAACAAA
AGATGGCGTTTTCACTTGGAATTAGTTATCTGAAGCTTTAGGATTCCTCAGCAATATGATTATG
AGACAAGAAAGGAAGATTCAGAAATGAGTCTAGTTGAAGGCAGCAATTCAGAGAAGAAGATTCA
GTTGTTATCATTGCCGTCCTGCTTGGTTTATGGCCTGGTTCAGGACCAAGGAGAGAAGTGTGAA
TACATGCCTCTTGAGCTATAGAATGAGACGCTGGAGTCACTAAGATGATTTTTTAAAAGTATTG
TTTTATAAACAAAAATAAGATTGTGACAAGGGATTCCACTATTAATGTTTTCATGCCTGTGCCT
TAATCTGACTGGGTATGGTGAGAATTGTGCTTGCAGCTTTAAGGTAAGAATTTTACCATCTTAA
TATGTTAAGAAGTGCCATTTCAGTCTCTCATCTCTACTCCAACTTGTCTTCTTAGGGGCTAAAG
TGCGGGCCGAGATCTACGAGGCCTTCGAGAATATCTACCCCATCCTGAAGGGCTTCAGAAAGAC
CACC
exemplary 5′ HA for knock-in cassette insertion at TBP locus
SEQ ID NO: 8
ACAAAAGATGGCGTTTTCACTTGGAATTAGTTATCTGAAGCTTTAGGATTCCTCAGCAATATGA
TTATGAGACAAGAAAGGAAGATTCAGAAATGAGTCTAGTTGAAGGCAGCAATTCAGAGAAGAAG
ATTCAGTTGTTATCATTGCCGTCCTGCTTGGTTTATGGCCTGGTTCAGGACCAAGGAGAGAAGT
GTGAATACATGCCTCTTGAGCTATAGAATGAGACGCTGGAGTCACTAAGATGATTTTTTAAAAG
TATTGTTTTATAAACAAAAATAAGATTGTGACAAGGGATTCCACTATTAATGTTTTCATGCCTG
TGCCTTAATCTGACTGGGTATGGTGAGAATTGTGCTTGCAGCTTTAAGGTAAGAATTTTACCAT
CTTAATATGTTAAGAAGTGCCATTTCAGTCTCTCATCTCTACTCCAACTTGTCTTCTTAGGTGC
TAAAGTCAGAGCAGAAATTTATGAAGCATTCGAGAACATCTACCCTATTCTAAAGGGATTCAGG
AAGACGACG
exemplary 3′ HA for knock-in cassette insertion at TBP locus
SEQ ID NO: 9
CAGAAATTTATGAAGCATTTGAAAACATCTACCCTATTCTAAAGGGATTCAGGAAGACGACGTA
ATGGCTCTCATGTACCCTTGCCTCCCCCACCCCCTTCTTTTTTTTTTTTTAAACAAATCAGTTT
GTTTTGGTACCTTTAAATGGTGGTGTTGTGAGAAGATGGATGTTGAGTTGCAGGGTGTGGCACC
AGGTGATGCCCTTCTGTAAGTGCCCACCGCGGGATGCCGGGAAGGGGCATTATTTGTGCACTGA
GAACACCGCGCAGCGTGACTGTGAGTTGCTCATACCGTGCTGCTATCTGGGCAGCGCTGCCCAT
TTATTTATATGTAGATTTTAAACACTGCTGTTGACAAGTTGGTTTGAGGGAGAAAACTTTAAGT
GTTAAAGCCACCTCTATAATTGATTGGACTTTTTAATTTTAATGTTTTTCCCCATGAACCACAG
TTTTTATATTTCTACCAGAAAAGTAAAAATCTTTTTTAAAAGTGTTGTTTTT
exemplary 3′ HA for knock-in cassette insertion at TBP locus
SEQ ID NO: 10
TAGGTGCTAAAGTCAGAGCAGAAATTTATGAAGCATTTGAAAACATCTACCCTATTCTAAAGGG
ATTCAGGAAGACGACGTAATGGCTCTCATGTACCCTTGCCTCCCCCACCCCCTTCTTTTTTTTT
TTTTAAACAAATCAGTTTGTTTTGGTACCTTTAAATGGTGGTGTTGTGAGAAGATGGATGTTGA
GTTGCAGGGTGTGGCACCAGGTGATGCCCTTCTGTAAGTGCCCACCGCGGGATGCCGGGAAGGG
GCATTATTTGTGCACTGAGAACACCGCGCAGCGTGACTGTGAGTTGCTCATACCGTGCTGCTAT
CTGGGCAGCGCTGCCCATTTATTTATATGTAGATTTTAAACACTGCTGTTGACAAGTTGGTTTG
AGGGAGAAAACTTTAAGTGTTAAAGCCACCTCTATAATTGATTGGACTTTTTAATTTTAATGTT
TTTCCCCATGAACCACAGTTTTTATATTTCTACCAGAAAAGTAAAAATCTTT
exemplary 3′ HA for knock-in cassette insertion at TBP locus
SEQ ID NO: 11
AAGGGATTCAGGAAGACGACGTAATGGCTCTCATGTACCCTTGCCTCCCCCACCCCCTTCTTTT
TTTTTTTTTAAACAAATCAGTTTGTTTTGGTACCTTTAAATGGTGGTGTTGTGAGAAGATGGAT
GTTGAGTTGCAGGGTGTGGCACCAGGTGATGCCCTTCTGTAAGTGCCCACCGCGGGATGCCGGG
AAGGGGCATTATTTGTGCACTGAGAACACCGCGCAGCGTGACTGTGAGTTGCTCATACCGTGCT
GCTATCTGGGCAGCGCTGCCCATTTATTTATATGTAGATTTTAAACACTGCTGTTGACAAGTTG
GTTTGAGGGAGAAAACTTTAAGTGTTAAAGCCACCTCTATAATTGATTGGACTTTTTAATTTTA
ATGTTTTTCCCCATGAACCACAGTTTTTATATTTCTACCAGAAAAGTAAAAATCTTTTTTAAAA
GTGTTGTTTTTCTAATTTATAACTCCTAGGGGTTATTTCTGTGCCAGACACA

[0242] In some embodiments, a donor template comprises a 5′ and/or 3′ homology arm homologous to a region of a G6PD locus. In some embodiments, a donor template comprises a 5′ homology arm comprising or consisting of the sequence of SEQ ID NO:12. In some embodiments, a 5′ homology arm comprises or consists of a sequence that is at least 85%, 90%, 95%, 98% or 99% identical to the sequence of SEQ ID NO: 12. In some embodiments, a donor template comprises a 3′ homology arm comprising or consisting of the sequence of SEQ ID NO: 13. In certain embodiments, a 3′ homology arm comprises or consists of a sequence that is at least 85%, 90%, 95%, 98% or 99% identical to the sequence of SEQ ID NO:13.

[0243] In some embodiments, a donor template comprises a 5′ homology arm comprising SEQ ID NO: 12, and a 3′ homology arm comprising SEQ ID NO: 13.

exemplary 5′ HA for knock-in cassette insertion at G6PD locus
SEQ ID NO: 12
GGCCCGGGGGACTCCACATGGTGGCAGGCAGTGGCATCAGCAAGACACTCTCTCCCTCACAGAA
CGTGAAGCTCCCTGACGCCTATGAGCGCCTCATCCTGGACGTCTTCTGCGGGAGCCAGATGCAC
TTCGTGCGCAGGTGAGGCCCAGCTGCCGGCCCCTGCATACCTGTGGGCTATGGGGTGGCCTTTG
CCCTCCCTCCCTGTGTGCCACCGGCCTCCCAAGCCATACCATGTCCCCTCAGCGACGAGCTCCG
TGAGGCCTGGCGTATTTTCACCCCACTGCTGCACCAGATTGAGCTGGAGAAGCCCAAGCCCATC
CCCTATATTTATGGCAGGTGAGGAAAGGGTGGGGGCTGGGGACAGAGCCCAGCGGGCAGGGGCG
GGGTGAGGGTGGAGCTACCTCATGCCTCTCCTCCACCCGTCACTCTCCAGCCGAGGCCCCACGG
AGGCAGACGAGCTGATGAAGAGAGTGGGCTTCCAGTACGAGGGAACCTACAAATGGGTCAACCC
TCACAAGCTG
exemplary 3′ HA for knock-in cassette insertion at G6PD locus
SEQ ID NO: 13
GTGGGTGAACCCCCACAAGCTCTGAGCCCTGGGCACCCACCTCCACCCCCGCCACGGCCACCCT
CCTTCCCGCCGCCCGACCCCGAGTCGGGAGGACTCCGGGACCATTGACCTCAGCTGCACATTCC
TGGCCCCGGGCTCTGGCCACCCTGGCCCGCCCCTCGCTGCTGCTACTACCCGAGCCCAGCTACA
TTCCTCAGCTGCCAAGCACTCGAGACCATCCTGGCCCCTCCAGACCCTGCCTGAGCCCAGGAGC
TGAGTCACCTCCTCCACTCACTCCAGCCCAACAGAAGGAAGGAGGAGGGCGCCCATTCGTCTGT
CCCAGAGCTTATTGGCCACTGGGTCTCACTCCTGAGTGGGGCCAGGGTGGGAGGGAGGGACGAG
GGGGAGGAAAGGGGCGAGCACCCACGTGAGAGAATCTGCCTGTGGCCTTGCCCGCCAGCCTCAG
TGCCACTTGACATTCCTTGTCACCAGCAACATCTCGAGCCCCCTGGATGTCC

[0244] In some embodiments, a donor template comprises a 5′ and/or 3′ homology arm homologous to a region of an E2F4 locus. In some embodiments, a donor template comprises a 5′ homology arm comprising or consisting of the sequence of SEQ ID NO: 14, 15, or 16. In some embodiments, a 5′ homology arm comprises or consists of a sequence that is at least 85%, 90%, 95%, 98% or 99% identical to the sequence of SEQ ID NO: 14, 15, or 16. In some embodiments, a donor template comprises a 3′ homology arm comprising or consisting of the sequence of SEQ ID NO: 17, 18, or 19. In certain embodiments, a 3′ homology arm comprises or consists of a sequence that is at least 85%, 90%, 95%, 98% or 99% identical to the sequence of SEQ ID NO: 17, 18, or 19.

[0245] In some embodiments, a donor template comprises a 5′ homology arm comprising SEQ ID NO: 14, and a 3′ homology arm comprising SEQ ID NO: 17. In some embodiments, a donor template comprises a 5′homology arm comprising SEQ ID NO: 15, and a 3′ homology arm comprising SEQ ID NO: 18. In some embodiments, a donor template comprises a 5′ homology arm comprising SEQ ID NO: 16, and a 3′ homology arm comprising SEQ ID NO: 19.

exemplary 5′ HA for knock-in cassette insertion at E2F4 locus
SEQ ID NO: 14
CCAGGGGGCTGTAGTGGGGCCAGGCTGGACCTCTGTGCCCTGAGCATGGCTTTCTTGTTTTTCA
GTTTTGGAACTCCCCAAAGAGCTGTCAGAAATCTTTGATCCCACACGAGGTAGGCTGCTGCATT
CCTCCCTGAGGCTAGGGGTAAGGGACACAGCTCATTGGGTCCTATGGCTGTTTTCTTGCCCTTT
TGAGGACCTTGTTGTGGCGCTTATGGTAACTGGGGCAAAGGGTGAAGTTCCTGATGGGCAGGTG
GGGTTCCCTTTCCTGGGCTTTGGTGGGTGGAGAGGTGGGAGCTGGAATGTTAGTAACTGAGCTC
CCTCCATTCCCAGAGTGCATGAGCTCGGAGCTGCTGGAGGAGTTGATGTCCTCAGAAGGTGGGT
GGCCCTGGAAGGTGGGAGTGGGTGTGGGCAGGGGTTGGGCTGCTGCTAGGGGAGCCCTGGCCCA
GGGCCTGAGACTAGTGCTCTCTGCAGTGTTCGCCCCTCTGCTGAGACTTTCTCCTCCTCCTGGC
GACCACGACTACATCTACAACCTGGACGAGAGCGAGGGCGTGTGCGACCTGTTTGATGTGCCCG
TGCTGAACCTG
exemplary 5′ HA for knock-in cassette insertion at E2F4 locus
SEQ ID NO: 15
CCAGGCTGGACCTCTGTGCCCTGAGCATGGCTTTCTTGTTTTTCAGTTTTGGAACTCCCCAAAG
AGCTGTCAGAAATCTTTGATCCCACACGAGGTAGGCTGCTGCATTCCTCCCTGAGGCTAGGGGT
AAGGGACACAGCTCATTGGGTCCTATGGCTGTTTTCTTGCCCTTTTGAGGACCTTGTTGTGGCG
CTTATGGTAACTGGGGCAAAGGGTGAAGTTCCTGATGGGCAGGTGGGGTTCCCTTTCCTGGGCT
TTGGTGGGTGGAGAGGTGGGAGCTGGAATGTTAGTAACTGAGCTCCCTCCATTCCCAGAGTGCA
TGAGCTCGGAGCTGCTGGAGGAGTTGATGTCCTCAGAAGGTGGGTGGCCCTGGAAGGTGGGAGT
GGGTGTGGGCAGGGGTTGGGCTGCTGCTAGGGGAGCCCTGGCCCAGGGCCTGAGACTAGTGCTC
TCTGCAGTGTTTGCCCCTCTGCTTCGTCTTAGTCCTCCTCCGGGCGACCACGACTACATCTACA
ACCTGGACGAGAGCGAGGGCGTGTGCGACCTGTTTGATGTGCCCGTGCTGAACCTG
exemplary 5′ HA for knock-in cassette insertion at E2F4 locus
SEQ ID NO: 16
GTCAGAAATCTTTGATCCCACACGAGGTAGGCTGCTGCATTCCTCCCTGAGGCTAGGGGTAAGG
GACACAGCTCATTGGGTCCTATGGCTGTTTTCTTGCCCTTTTGAGGACCTTGTTGTGGCGCTTA
TGGTAACTGGGGCAAAGGGTGAAGTTCCTGATGGGCAGGTGGGGTTCCCTTTCCTGGGCTTTGG
TGGGTGGAGAGGTGGGAGCTGGAATGTTAGTAACTGAGCTCCCTCCATTCCCAGAGTGCATGAG
CTCGGAGCTGCTGGAGGAGTTGATGTCCTCAGAAGGTGGGTGGCCCTGGAAGGTGGGAGTGGGT
GTGGGCAGGGGTTGGGCTGCTGCTAGGGGAGCCCTGGCCCAGGGCCTGAGACTAGTGCTCTCTG
CAGTGTTTGCCCCTCTGCTTCGTCTTTCTCCACCCCCGGGAGACCACGATTATATCTACAACCT
GGACGAGAGTGAAGGTGTCTGTGACCTCTTCGACGTGCCCGTGCTCAACCTC
exemplary 3′ HA for knock-in cassette insertion at E2F4 locus
SEQ ID NO: 17
CCACCCCCGGGAGACCACGATTATATCTACAACCTGGACGAGAGTGAAGGTGTCTGTGACCTCT
TTGATGTGCCTGTTCTCAACCTCTGACTGACAGGGACATGCCCTGTGTGGCTGGGACCCAGACT
GTCTGACCTGGGGGTTGCCTGGGGACCTCTCCCACCCGACCCCTACAGAGCTTGAGAGCCACAG
ACGCCTGGCTTCTCCGGCCTCCCCTCACCGCACAGTTCTGGCCACAGCTCCCGCTCCTGTGCTG
GCACTTCTGTGCTCGCAGAGCAGGGGAACAGGACTCAGCCCCCATCACCGTGGAGCCAAAGTGT
TTGCTTCTCCCTTTCTGCGGCCTTCGCCAGCCCAGGCTCGGCTGCCACCCAGTGGCACAGAACC
GAGGAGCTGCCATTACCCCCCATAGGGGGCAGTGTCTTGTTCCTGCCAGCCTCAGTGTCTTGCT
TCTGCCAGCTCCTTCCCCTAGGAGGGAAGGGTGGGGTGGAACTGGGCACATG
exemplary 3′ HA for knock-in cassette insertion at E2F4 locus
SEQ ID NO: 18
ATTATATCTACAACCTGGACGAGAGTGAAGGTGTCTGTGACCTCTTTGATGTGCCTGTTCTCAA
CCTCTGACTGACAGGGACATGCCCTGTGTGGCTGGGACCCAGACTGTCTGACCTGGGGGTTGCC
TGGGGACCTCTCCCACCCGACCCCTACAGAGCTTGAGAGCCACAGACGCCTGGCTTCTCCGGCC
TCCCCTCACCGCACAGTTCTGGCCACAGCTCCCGCTCCTGTGCTGGCACTTCTGTGCTCGCAGA
GCAGGGGAACAGGACTCAGCCCCCATCACCGTGGAGCCAAAGTGTTTGCTTCTCCCTTTCTGCG
GCCTTCGCCAGCCCAGGCTCGGCTGCCACCCAGTGGCACAGAACCGAGGAGCTGCCATTACCCC
CCATAGGGGGCAGTGTCTTGTTCCTGCCAGCCTCAGTGTCTTGCTTCTGCCAGCTCCTTCCCCT
AGGAGGGAAGGGTGGGGTGGAACTGGGCACATGCCAGCACCACTTCTAGCTT
exemplary 3′ HA for knock-in cassette insertion at E2F4 locus
SEQ ID NO: 19
TGACTGACAGGGACATGCCCTGTGTGGCTGGGACCCAGACTGTCTGACCTGGGGGTTGCCTGGG
GACCTCTCCCACCCGACCCCTACAGAGCTTGAGAGCCACAGACGCCTGGCTTCTCCGGCCTCCC
CTCACCGCACAGTTCTGGCCACAGCTCCCGCTCCTGTGCTGGCACTTCTGTGCTCGCAGAGCAG
GGGAACAGGACTCAGCCCCCATCACCGTGGAGCCAAAGTGTTTGCTTCTCCCTTTCTGCGGCCT
TCGCCAGCCCAGGCTCGGCTGCCACCCAGTGGCACAGAACCGAGGAGCTGCCATTACCCCCCAT
AGGGGGCAGTGTCTTGTTCCTGCCAGCCTCAGTGTCTTGCTTCTGCCAGCTCCTTCCCCTAGGA
GGGAAGGGTGGGGTGGAACTGGGCACATGCCAGCACCACTTCTAGCTTCCTTCGCTATCCCCCA
CCCCCTGACCCTCCAGCTCCTCCTGGCCCTCTCACGTGCCCACTTCTGCTGG

[0246] In some embodiments, a donor template comprises a 5′ and/or 3′ homology arm homologous to a region of a KIF11 locus. In some embodiments, a donor template comprises a 5′ homology arm comprising or consisting of the sequence of SEQ ID NO: 20, 21, or 22. In some embodiments, a 5′ homology arm comprises or consists of a sequence that is at least 85%, 90%, 95%, 98% or 99% identical to the sequence of SEQ ID NO: 20, 21, or 22. In some embodiments, a donor template comprises a 3′ homology arm comprising or consisting of the sequence of SEQ ID NO: 23, 24, or 25. In certain embodiments, a 3′ homology arm comprises or consists of a sequence that is at least 85%, 90%, 95%, 98% or 99% identical to the sequence of SEQ ID NO: 23, 24, or 25.

[0247] In some embodiments, a donor template comprises a 5′ homology arm comprising SEQ ID NO: 20, and a 3′ homology arm comprising SEQ ID NO: 23. In some embodiments, a donor template comprises a 5′homology arm comprising SEQ ID NO: 21, and a 3′ homology arm comprising SEQ ID NO: 24. In some embodiments, a donor template comprises a 5′ homology arm comprising SEQ ID NO: 22, and a 3′ homology arm comprising SEQ ID NO: 25.

-exemplary 5′ HA for knock-in cassette insertion at KIF11 locus
SEQ ID NO: 20
AGAGCAGGGTTTCTTGACAGCAGTGCTATTGGCATTTTAAACTGGATAATTCTTTGTTGTGATG
GGCTTTCCTGTGGACTGTACTATGTTGGTACACAAGAAAAACAGTGTACTATGTGAATACTCAC
TCAAAGCCAGTAGCACTCCCTGATTGTAACACCAAAAAAGTCTCTCAGCATTGCCAAATGTCCC
CTGTGGCAGCAGAATCACTCCCTGATGAGAACCACTACCCTGGAGTAAAATCTATAACTATGTC
TTAGAAAATAACACAGAAAATTAATATTTCTTTCACTCTACTCCTTCCATTAGTGATCAAATAA
AGAAGGCATTTGGCGCTACTTGCCAAATTGTTGGCTCAAACTTGTGCTGAACCTTTTTTGGTTT
TCTACACTTAAGTTTTTTTGCCTATAACCCAGAGAACTTTGAAAATAGAGTGTAGTTAATGTGT
ATCTAATGTTACTTTGTATTGACTTAATTTACCGGCCTTTAATCCACAGCATAAGAAGTCCCAC
GGCAAGGACAAAGAGAACCGGGGCATCAACACACTGGAACGGTCCAAGGTCGAGGAAACAACCG
AGCACCTGGTCACCAAGAGCAGACTGCCTCTGAGAGCCCAGATCAACCTG
-exemplary 5′ HA for knock-in cassette insertion at KIF11 locus
SEQ ID NO: 21
TTCCTGTGGACTGTACTATGTTGGTACACAAGAAAAACAGTGTACTATGTGAATACTCACTCAA
AGCCAGTAGCACTCCCTGATTGTAACACCAAAAAAGTCTCTCAGCATTGCCAAATGTCCCCTGT
GGCAGCAGAATCACTCCCTGATGAGAACCACTACCCTGGAGTAAAATCTATAACTATGTCTTAG
AAAATAACACAGAAAATTAATATTTCTTTCACTCTACTCCTTCCATTAGTGATCAAATAAAGAA
GGCATTTGGCGCTACTTGCCAAATTGTTGGCTCAAACTTGTGCTGAACCTTTTTTGGTTTTCTA
CACTTAAGTTTTTTTGCCTATAACCCAGAGAACTTTGAAAATAGAGTGTAGTTAATGTGTATCT
AATGTTACTTTGTATTGACTTAATTTTCCCGCCTTAAATCCACAGCATAAAAAATCACATGGAA
AAGACAAAGAAAACAGAGGCATTAACACACTGGAGAGGTCTAAAGTGGAAGAAACAACCGAGCA
CCTGGTCACCAAGAGCAGACTGCCTCTGAGAGCCCAGATCAACCTG
-exemplary 5′ HA for knock-in cassette insertion at KIF11 locus
SEQ ID NO: 22
TTAAACTGGATAATTCTTTGTTGTGATGGGCTTTCCTGTGGACTGTACTATGTTGGTACACAAG
AAAAACAGTGTACTATGTGAATACTCACTCAAAGCCAGTAGCACTCCCTGATTGTAACACCAAA
AAAGTCTCTCAGCATTGCCAAATGTCCCCTGTGGCAGCAGAATCACTCCCTGATGAGAACCACT
ACCCTGGAGTAAAATCTATAACTATGTCTTAGAAAATAACACAGAAAATTAATATTTCTTTCAC
TCTACTCCTTCCATTAGTGATCAAATAAAGAAGGCATTTGGCGCTACTTGCCAAATTGTTGGCT
CAAACTTGTGCTGAACCTTTTTTGGTTTTCTACACTTAAGTTTTTTTGCCTATAACCCAGAGAA
CTTTGAAAATAGAGTGTAGTTAATGTGTATCTAATGTTACTTTGTATTGACTTAATTTTCCCGC
CTTAAATCCACAGCATAAAAAATCACATGGAAAAGACAAAGAAAACAGAGGCATCAACACACTG
GAACGGTCCAAGGTCGAGGAAACAACCGAGCACCTGGTCACCAAGAGCAGACTGCCTCTGAGAG
CCCAGATCAACCTG
-exemplary 3′ HA for knock-in cassette insertion at KIF11 locus
SEQ ID NO: 23
AAAAAATCACATGGAAAAGACAAAGAAAACAGAGGCATTAACACACTGGAGAGGTCTAAAGTGG
AAGAAACTACAGAGCACTTGGTTACAAAGAGCAGATTACCTCTGCGAGCCCAGATCAACCTTTA
ATTCACTTGGGGGTTGGCAATTTTATTTTTAAAGAAAACTTAAAAATAAAACCTGAAACCCCAG
AACTTGAGCCTTGTGTATAGATTTTAAAAGAATATATATATCAGCCGGGCGCGGTGGCTCATGC
CTGTAATCCCAGCACTTTGGGAGGCTGAGGCGGGTGGATTGCTTGAGCCCAGGAGTTTGAGACC
AGCCTGGCCAACGTGGCAAAACCTCGTCTCTGTTAAAAATTAGCCGGGCGTGGTGGCACACTCC
TGTAATCCCAGCTACTGGGGAGGCTGAGGCACGAGAATCACTTGAACCCAGGAAGCGGGGTTGC
AGTGAGCCAAAGGTACACCACTACACTCCAGCCTGGGCAACAGAGCAAGACT
-exemplary 3′ HA for knock-in cassette insertion at KIF11 locus
SEQ ID NO: 24
AACTACAGAGCACTTGGCTACATAGAGCAGATTACCTCTGCGAGCCCAGATCAACCTTTAATTC
ACTTGGGGGTTGGCAATTTTATTTTTAAAGAAAACTTAAAAATAAAACCTGAAACCCCAGAACT
TGAGCCTTGTGTATAGATTTTAAAAGAATATATATATCAGCCGGGCGCGGTGGCTCATGCCTGT
AATCCCAGCACTTTGGGAGGCTGAGGCGGGTGGATTGCTTGAGCCCAGGAGTTTGAGACCAGCC
TGGCCAACGTGGCAAAACCTCGTCTCTGTTAAAAATTAGCCGGGCGTGGTGGCACACTCCTGTA
ATCCCAGCTACTGGGGAGGCTGAGGCACGAGAATCACTTGAACCCAGGAAGCGGGGTTGCAGTG
AGCCAAAGGTACACCACTACACTCCAGCCTGGGCAACAGAGCAAGACTCGGTCTCAAAAACAAA
ATTTAAAAAAGATATAAGGCAGTACTGTAAATTCAGTTGAATTTTGATATCT
-exemplary 3′ HA for knock-in cassette insertion at KIF11 locus
SEQ ID NO: 25
ATTAACACACTGGAGAGTTCTGAAGTGGAAGAAACTACAGAGCACTTGGTTACAAAGAGCAGAT
TACCTCTGCGAGCCCAGATCAACCTTTAATTCACTTGGGGGTTGGCAATTTTATTTTTAAAGAA
AACTTAAAAATAAAACCTGAAACCCCAGAACTTGAGCCTTGTGTATAGATTTTAAAAGAATATA
TATATCAGCCGGGCGCGGTGGCTCATGCCTGTAATCCCAGCACTTTGGGAGGCTGAGGCGGGTG
GATTGCTTGAGCCCAGGAGTTTGAGACCAGCCTGGCCAACGTGGCAAAACCTCGTCTCTGTTAA
AAATTAGCCGGGCGTGGTGGCACACTCCTGTAATCCCAGCTACTGGGGAGGCTGAGGCACGAGA
ATCACTTGAACCCAGGAAGCGGGGTTGCAGTGAGCCAAAGGTACACCACTACACTCCAGCCTGG
GCAACAGAGCAAGACTCGGTCTCAAAAACAAAATTTAAAAAAGATATAAGGC

### Inverted Terminal Repeats (ITRs)

[0248] In certain embodiments, a donor template, e.g., a reference donor template, comprises an AAV derived sequence. In certain embodiments, a donor template comprises AAV derived sequences that are typical of an AAV construct, such as cis-acting 5′ and 3′ inverted terminal repeats (ITRs) (See, e.g., B. J. Carter, in “Handbook of Parvoviruses”, ed., P. Tijsser, CRC Press, pp. 155 168 (1990), which is incorporated in its entirety herein by reference). Generally, ITRs are able to form a hairpin. The ability to form a hairpin can contribute to an ITRs ability to self-prime, allowing primase-independent synthesis of a second DNA strand. ITRs also play a role in integration of AAV construct (e.g., a coding sequence) into a genome of a target cell. ITRs can also aid in efficient encapsidation of an AAV construct in an AAV particle.

[0249] In some embodiments, a donor template described herein, e.g., a reference donor template described herein, is included within an rAAV particle (e.g., an AAV6 particle). In some embodiments, an ITR is or comprises about 145 nucleic acids. In some embodiments, all or substantially all of a sequence encoding an ITR is used. In some embodiments, an AAV ITR sequence may be obtained from any known AAV, including presently identified mammalian AAV types. In some embodiments an ITR is an AAV6 ITR.

[0250] An example of an AAV construct employed in the present disclosure (e.g., a reference AAV construct) is a “cis-acting” construct containing a cargo sequence (e.g., a donor template described herein), in which the donor template is flanked by 5′ or “left” and 3′ or “right” AAV ITR sequences. 5′ and left designations refer to a position of an ITR sequence relative to an entire construct, read left to right, in a sense direction. For example, in some embodiments, a 5′ or left ITR is an ITR that is closest to a target loci promoter (as opposed to a polyadenylation sequence) for a given construct, when a construct is depicted in a sense orientation, linearly. Concurrently, 3′ and right designations refer to a position of an ITR sequence relative to an entire construct, read left to right, in a sense direction. For example, in some embodiments, a 3′ or right ITR is an ITR that is closest to a polyadenylation sequence in a target loci (as opposed to a promoter sequence) for a given construct, when a construct is depicted in a sense orientation, linearly. ITRs as provided herein are depicted in 5′ to 3′ order in accordance with a sense strand. Accordingly, one of skill in the art will appreciate that a 5′ or “left” orientation ITR can also be depicted as a 3′ or “right” ITR when converting from sense to antisense direction. Further, it is well within the ability of one of skill in the art to transform a given sense ITR sequence (e.g., a 5′/left AAV ITR) into an antisense sequence (e.g., 3′/right ITR sequence). One of ordinary skill in the art would understand how to modify a given ITR sequence for use as either a 5′/left or 3′/right ITR, or an antisense version thereof.

[0251] For example, in some embodiments an ITR (e.g., a 5′ITR) can have a sequence according to SEQ ID NO: 158. In some embodiments, an ITR (e.g., a 3′ ITR) can have a sequence according to SEQ ID NO: 159. In some embodiments, an ITR includes one or more modifications. e.g., truncations, deletions, substitutions or insertions, as is known in the art. In some embodiments, an ITR comprises fewer than 145 nucleotides, e.g., 127, 130, 134 or 141 nucleotides. For example, in some embodiments, an ITR comprises 110, 111, 112, 113, 114, 115, 116, 117, 118, 119, 120, 121, 122, 123, 124, 125, 126, 127, 128, 129, 130, 131, 132, 133, 134, 135, 136, 137, 138, 139, 140, 141, 142, 143 144, or 145 nucleotides.

[0252] A non-limiting example of 5′ AAV ITR sequences includes SEQ ID NO: 158. A non-limiting example of 3′ AAV ITR sequences includes SEQ ID NO: 159. In some embodiments, the 5′ and a 3′ AAV ITRs (e.g., SEQ ID NO: 158 and 159) flank a donor template described herein (e.g., a donor template comprising a 5′HA, a knock-in cassette, and a 3′ HA). The ability to modify ITR sequences is within the skill of the art. (See, e.g., texts such as Sambrook et al. “Molecular Cloning. A Laboratory Manual”, 2d ed., Cold Spring Harbor Laboratory, New York (1989); and K. Fisher et al., J Virol., 70:520 532 (1996), each of which is incorporated in its entirety herein by reference). In some embodiments, a 5′ITR sequence is at least 85%, 90%, 95%, 98% or 99% identical to a 5′ ITR sequence represented by SEQ ID NO: 158. In some embodiments, a 3′ ITR sequence is at least 85%, 90%, 95%, 98% or 99% identical to a 3′ ITR sequence represented by SEQ ID NO: 159.

-exemplary 5′ ITR for knock-in cassette insertion
SEQ ID NO: 158
CCTGCAGGCAGCTGCGCGCTCGCTCGCTCACTGAGGCCGCCCGGGCAAA
GCCCGGGCGTCGGGCGACCTTTGGTCGCCCGGCCTCAGTGAGCGAGCGA
GCGCGCAGAGAGGGAGTGGCCAACTCCATCACTAGGGGTTCCT
-exemplary 3′ ITR for knock-in cassette insertion
SEQ ID NO: 159
AGGAACCCCTAGTGATGGAGTTGGCCACTCCCTCTCTGCGCGCTCGCTC
GCTCACTGAGGCCGGGCGACCAAAGGTCGCCCGACGCCCGGGCTTTGCC
CGGGCGGCCTCAGTGAGCGAGCGAGCGCGCAGCTGCCTGCAGG

### Flanking Untranslated Regions, 5′ UTRs and 3′ UTRs

[0253] In some embodiments, a knock-in cassette described herein includes all or a portion of an untranslated region (UTR), such as a 5′ UTR and/or a 3′ UTR. UTRs of a gene are transcribed but not translated. A 5′ UTR starts at a transcription start site and continues to the start codon but does not include the start codon. A 3′ UTR starts immediately following the stop codon and continues until the transcriptional termination signal. The regulatory and/or control features of a UTR can be incorporated into any of the knock-in cassettes described herein to enhance or otherwise modulate the expression of an essential target gene loci and/or a cargo sequence.

[0254] Natural 5′ UTRs include a sequence that plays a role in translation initiation. In some embodiments, a 5′ UTR comprises sequences, like Kozak sequences, which are commonly known to be involved in the process by which the ribosome initiates translation of many genes. Kozak sequences have the consensus sequence CCR (A/G) CCAUGG, where R is a purine (A or G) three bases upstream of the start codon (AUG), and the start codon is followed by another “G”. The 5′ UTRs have also been known to form secondary structures that are involved in elongation factor binding. Non-limiting examples of 5′ UTRs include those from the following genes: albumin, serum amyloid A. Apolipoprotein A/B/E, transferrin, alpha fetoprotein, erythropoietin, and Factor VIII.

[0255] In some embodiments, a UTR may comprise a non-endogenous regulatory region. In some embodiments, a UTR that comprises a non-endogenous regulatory region is a 3′ UTR. In some embodiments, a UTR that comprises a non-endogenous regulatory region is a 5′ UTR. In some embodiments, a non-endogenous regulatory region may be a target of at least one inhibitory nucleic acid. In some embodiments, an inhibitory nucleic acid inhibits expression and/or activity of a target gene. In some embodiments, an inhibitory nucleic acid is a short interfering RNA (siRNA), a short hairpin RNA (shRNA), a microRNA (miRNA), an antisense oligonucleotide, a guide RNA (gRNA), or a ribozyme. In some embodiments, an inhibitory nucleic acid is an endogenous molecule. In some embodiments, an inhibitory nucleic acid is a non-endogenous molecule. In some embodiments, an inhibitory nucleic acid displays a tissue specific expression pattern. In some embodiments, an inhibitory nucleic acid displays a cell specific expression pattern.

[0256] In some embodiments, a knock-in cassette may comprise more than one non-endogenous regulatory regions, e.g., two, three, four, five, six, seven, eight, nine, or ten regulatory regions. In some embodiments, a knock-in cassette may comprise four non-endogenous regulatory regions. In some embodiments, a construct may comprise more than one non-endogenous regulatory regions, wherein at least one of the more than one non-endogenous regulatory regions are not the same as at least one of the other non-endogenous regulatory regions.

[0257] In some embodiments, a 3′ UTR is found immediately 3′ to the stop codon of a gene of interest. In some embodiments, a 3′ UTR from an mRNA that is transcribed by a target cell can be included in any knock-in cassette described herein. In some embodiments, a 3′ UTR is derived from an endogenous target loci and may include all or part of the endogenous sequence. In some embodiments, a 3′ UTR sequence is at least 85%, 90%, 95% or 98% identical to the sequence of SEQ ID NO: 26.

-exemplary 3′ UTR for knock-in cassette
insertion
SEQ ID NO: 26
GCGGCCGCGTCGAGTCTAGAGGGCCCGTTTAAACCCGCTGATCAGCCTC
GA

### Polyadenylation Sequences

[0258] In some embodiments, a knock-in cassette construct provided herein can include a polyadenylation (poly(A)) signal sequence. Most nascent eukaryotic mRNAs possess a poly(A) tail at their 3′ end, which is added during a complex process that includes cleavage of the primary transcript and a coupled polyadenylation reaction driven by the poly(A) signal sequence (see, e.g., Proudfoot et al., Cell 108:501-512, 2002, which is incorporated herein by reference in its entirety). A poly(A) tail confers mRNA stability and transferability (Molecular Biology of the Cell, Third Edition by B. Alberts et al., Garland Publishing, 1994, which is incorporated herein by reference in its entirety). In some embodiments, a poly(A) signal sequence is positioned 3′ to a coding sequence.

[0259] As used herein, “polyadenylation” refers to the covalent linkage of a polyadenylyl moiety, or its modified variant, to a messenger RNA molecule. In eukaryotic organisms, most messenger RNA (mRNA) molecules are polyadenylated at the 3′ end. A 3′ poly(A) tail is a long sequence of adenine nucleotides (e.g., 50, 60, 70, 100, 200, 500, 1000, 2000, 3000, 4000, or 5000) added to the pre-mRNA through the action of an enzyme, polyadenylate polymerase. In some embodiments, a poly(A) tail is added onto transcripts that contain a specific sequence, e.g., a polyadenylation (or poly(A)) signal. A poly(A) tail and associated proteins aid in protecting mRNA from degradation by exonucleases. Polyadenylation also plays a role in transcription termination, export of the mRNA from the nucleus, and translation. Polyadenylation typically occurs in the nucleus immediately after transcription of DNA into RNA, but also can occur later in the cytoplasm. After transcription has been terminated, an mRNA chain is cleaved through the action of an endonuclease complex associated with RNA polymerase. A cleavage site is usually characterized by the presence of the base sequence AAUAAA near the cleavage site. After the mRNA has been cleaved, adenosine residues are added to the free 3′ end at the cleavage site.

[0260] As used herein, a “poly(A) signal sequence” or “polyadenylation signal sequence” is a sequence that triggers the endonuclease cleavage of an mRNA and the addition of a series of adenosines to the 3′ end of the cleaved mRNA.

[0261] There are several poly(A) signal sequences that can be used, including those derived from bovine growth hormone (bGH) (Woychik et al., Proc. Natl. Acad. Sci. US.A. 81 (13): 3944-3948, 1984; U.S. Pat. No. 5,122,458, each of which is incorporated herein by reference in its entirety), mouse-β-globin, mouse-α-globin (Orkin et al., EMBO J 4 (2): 453-456, 1985; Thein et al., Blood71 (2): 313-319, 1988, each of which is incorporated herein by reference in its entirety), human collagen, polyoma virus (Batt et al., Mol. Cell Biol. 15 (9): 4783-4790, 1995, which is incorporated herein by reference in its entirety), the Herpes simplex virus thymidine kinase gene (HSV TK), IgG heavy-chain gene polyadenylation signal (US 2006/0040354, which is incorporated herein by reference in its entirety), human growth hormone (hGH) (Szymanski et al., Mol. Therapy 15 (7): 1340-1347, 2007, which is incorporated herein by reference in its entirety), the group comprising a SV40 poly(A) site, such as the SV40 late and early poly(A) site (Schek et al., Mol. Cell Biol. 12 (12): 5386-5393, 1992, which is incorporated herein by reference in its entirety).

[0262] The poly(A) signal sequence can be AATAAA. The AATAAA sequence may be substituted with other hexanucleotide sequences with homology to AATAAA and that are capable of signaling polyadenylation, including ATTAAA, AGTAAA, CATAAA, TATAAA, GATAAA, ACTAAA, AATATA, AAGAAA, AATAAT, AAAAAA, AATGAA, AATCAA, AACAAA, AATCAA, AATAAC, AATAGA, AATTAA, or AATAAG (see, e.g., WO 06/12414, which is incorporated herein by reference in its entirety).

[0263] In some embodiments, a poly(A) signal sequence can be a synthetic polyadenylation site (see, e.g., the pCI-neo expression construct of Promega that is based on Levitt et al., Genes Dev. 3 (7): 1019-1025, 1989, which is incorporated herein by reference in its entirety). In some embodiments, a poly(A) signal sequence is the polyadenylation signal of soluble neuropilin-1 (sNRP) (AAATAAAATACGAAATG) (scc, e.g., WO 05/073384, which is incorporated herein by reference in its entirety). In some embodiments, a poly(A) signal sequence comprises or consists of the SV40 poly(A) site. In some embodiments, a poly(A) signal sequence comprises or consists of SEQ ID NO: 27. In some embodiments, a poly(A) signal sequence comprises or consists of bGHpA. In some embodiments, a poly(A) signal sequence comprises or consists of SEQ ID NO: 28. Additional examples of poly(A) signal sequences are known in the art. In some embodiments, a poly(A) sequence is at least 85%, 90%, 95%, 98% or 99% identical to the sequence of SEQ ID NOs: 27 or 28.

-exemplary SV40 poly(A) signal sequence
SEQ ID NO: 27
AACTTGTTTATTGCAGCTTATAATGGTTACAAATAAAGCAATAGCATCA
CAAATTTCACAAATAAAGCATTTTTTTCACTGCATTCTAGTTGTGGTTT
GTCCAAACTCATCAATGTATCTTA
-exemplary bGH poly(A) signal sequence
SEQ ID NO: 28
CTGTGCCTTCTAGTTGCCAGCCATCTGTTGTTTGCCCCTCCCCCGTGCC
TTCCTTGACCCTGGAAGGTGCCACTCCCACTGTCCTTTCCTAATAAAAT
GAGGAAATTGCATCGCATTGTCTGAGTAGGTGTCATTCTATTCTGGGGG
GGGGGTGGGGCAGGACAGCAAGGGGGAGGATTGGGAAGACAATAGCAGG
CATGCTGGGGATGCGGTGGGCTCTATGG

### IRES and 2A Elements

[0264] In some embodiments, the knock-in cassette comprises a regulatory element that enables expression of the gene product encoded by the essential gene and the gene product of interest as separate gene products, e.g., an IRES or 2A element located between the exogenous coding sequence or partial coding sequence of the essential gene and the exogenous coding sequence for the gene product of interest.

[0265] In some embodiments, a knock-in cassette may comprise multiple gene products of interest (e.g., at least two gene products of interest). In some embodiments, gene products of interest may be separated by a regulatory element that enables expression of the at least two gene products of interest as more than one gene product, e.g., an IRES or 2A element located between the at least two coding sequences, facilitating creation of at least two peptide products.

[0266] Internal Ribosome Entry Site (IRES) elements are one type of regulatory element that are commonly used for this purpose. As is well known in the art, IRES elements allow for initiation of translation from an internal region of the mRNA and hence expression of two separate proteins from the same mRNA transcript. IRES was originally discovered in poliovirus RNA, where it promotes translation of the viral genome in eukaryotic cells. Since then, a variety of IRES sequences have been discovered-many from viruses, but also some from cellular mRNAs, e.g., see Mokrejs et al., Nucleic Acids Res. 2006; 34 (Database issue): D125-D130.

[0267] 2A elements are another type of regulatory element that are commonly used for this purpose. These 2A elements encode so-called “self-cleaving” 2A peptides which are short peptides (about 20 amino acids) that were first discovered in picornaviruses. The term “self-cleaving” is not entirely accurate, as these peptides are thought to function by making the ribosome skip the synthesis of a peptide bond at the C-terminus of a 2A element, leading to separation between the end of the 2A sequence and the next peptide downstream. The “cleavage” occurs between the Glycine (G) and Proline (P) residues found on the C-terminus meaning the upstream cistron, i.e., protein encoded by the essential gene will have a few additional residues from the 2A peptide added to the end, while the downstream cistron, i.e., gene product of interest will start with the Proline (P).

[0268] Table 2 below lists the four commonly used 2A peptides (an optional GSG sequence is sometimes added to the N-terminal end of the peptide to improve cleavage efficiency). There are many potential 2A peptides that may be suitable for methods and compositions described herein (see e.g., Luke et al., Occurrence, function and evolutionary origins of ‘2A-like’ sequences in virus genomes. J Gen Virol. 2008). Those skilled in the art know that the choice of specific 2A peptide for a particular knock-in cassette will ultimately depend on a number of factors such as cell type or experimental conditions. Those skilled in the art will recognize that nucleotide sequences encoding specific 2A peptides can vary while still encoding a peptide suitable for inducing a desired cleavage event.

TABLE 2
Exemplary IRES and 2A peptide and nucleic acid sequences

| SEQ ID NO: | 2A peptide | Amino acid sequence |
|---|---|---|
| 29 | T2A | EGRGSLLTCGDVEENPGP |
| 30 | P2A | ATNFSLLKQAGDVEENPGP |
| 31 | E2A | QCTNYALLKLAGDVESNPGP |
| 32 | F2A | VKQTLNFDLLKLAGDVESNPGP |
| 33 | T2A | GAGGGCAGAGGAAGTCTTCTAACATGCGGTGACGTGGAGGAGA |
| | | ATCCTGGCCCG |
| 34 | P2A | GGAAGCGGAGCTACTAACTTCAGCCTGCTGAAGCAGGCTGGAG |
| | | ACGTGGAGGAGAACCCTGGACCT |
| 35 | E2A | CAGTGTACTAATTATGCTCTCTTGAAATTGGCTGGAGATGTTG |
| | | AGAGCAACCCTGGACCT |
| 36 | F2A | GTGAAACAGACTTTGAATTTTGACCTTCTCAAGTTGGCGGGAG |
| | | ACGTGGAGTCCAACCCTGGACCT |
| 37 | IRES | CCCCTCTCCCTCCCCCCCCCCTAACGTTACTGGCCGAAGCCGC |
| | | TTGGAATAAGGCCGGTGTGCGTTTGTCTATATGTTATTTTCCA |
| | | CCATATTGCCGTCTTTTGGCAATGTGAGGGCCCGGAAACCTGG |
| | | CCCTGTCTTCTTGACGAGCATTCCTAGGGGTCTTTCCCCTCTC |
| | | GCCAAAGGAATGCAAGGTCTGTTGAATGTCGTGAAGGAAGCAG |
| | | TTCCTCTGGAAGCTTCTTGAAGACAAACAACGTCTGTAGCGAC |
| | | CCTTTGCAGGCAGCGGAACCCCCCACCTGGCGACAGGTGCCTC |
| | | TGCGGCCAAAAGCCACGTGTATAAGATACACCTGCAAAGGCGG |
| | | CACAACCCCAGTGCCACGTTGTGAGTTGGATAGTTGTGGAAAG |
| | | AGTCAAATGGCTCTCCTCAAGCGTATTCAACAAGGGGCTGAAG |
| | | GATGCCCAGAAGGTACCCCATTGTATGGGATCTGATCIGGGGC |
| | | CTCGGTGCACATGCTTTACATGTGTTTAGTCGAGGTTAAAAAA |
| | | ACGTCTAGGCCCCCCGAACCACGGGGACGTGGTTTTCCTTTGA |
| | | AAAACACGATGATAA |

### Essential Genes

[0269] An essential gene can be any gene that is essential for the survival and/or the proliferation of the cell. In some embodiments, an essential gene is a housekeeping gene that is essential for survival of all cell types, e.g., a gene listed in Table 3. See also other housekeeping genes discussed in Eisenberg, Trends in Gen. 2014; 30 (3): 119-20 and Moein et al., Adv. Biomed Res. 2017; 6:15. Additional genes that are essential for various cell types, including iPSCs/ESCs, are listed in Table 4 (see also the essential genes discussed in Yilmaz et al., Nat. Cell Biol. 2018; 20:610-619 the entire contents of which are incorporated herein by reference).

[0270] In some embodiments the essential gene is GAPDH and the DNA nuclease causes a break in exon 9, e.g., a double-strand break. In some embodiments the essential gene is TBP and the DNA nuclease causes a break in exon 7, or exon 8, e.g., a double-strand break. In some embodiments the essential gene is E2F4 and the DNA nuclease causes a break in exon 10, e.g., a double-strand break. In some embodiments the essential gene is G6PD and the DNA nuclease causes a break in exon 13, e.g., a double-strand break. In some embodiments the essential gene is KIF11 and the DNA nuclease causes a break in exon 22, e.g., a double-strand break.

TABLE 3
Exemplary housekeeping genes

| | Gene | | |
|---|---|---|---|
| Ensembl ID | Symbol | Ensembl ID | Gene Symbol |
| ENSG00000075624 | ACTB | ENSG00000231500 | RPS18 |
| ENSG00000116459 | ATP5F1 | ENSG00000112592 | TBP |
| ENSG00000166710 | B2M | ENSG00000072274 | TFRC |
| ENSG00000111640 | GAPDH | ENSG00000164924 | YWHAZ |
| ENSG00000169919 | GUSB | ENSG00000089157 | RPLP0 |
| ENSG00000165704 | HPRT1 | ENSG00000142541 | RPL13A |
| ENSG00000102144 | PGK1 | ENSG00000147604 | RPL7 |
| ENSG00000196262 | PPIA | ENSG00000205250 | E2F4 |
| ENSG00000138160 | KIF11 | ENSG00000160211 | G6PD |

TABLE 4
Additional exemplary essential genes

| | Gene | | |
|---|---|---|---|
| Ensembl ID | Symbol | Ensembl ID | Gene Symbol |
| ENSG00000111704 | NANOG | ENSG00000181449 | SOX2 |
| ENSG00000179059 | ZFP42 | ENSG00000136997 | MYC |
| ENSG00000136826 | KLF4 | ENSG00000175166 | PSMD2 |
| ENSG00000118655 | DCLRE1B | ENSG00000070614 | NDST1 |
| ENSG00000172409 | CLP1 | ENSG00000115484 | CCT4 |
| ENSG00000082898 | XPO1 | ENSG00000100890 | KIAA0391 |
| ENSG00000114867 | EIF4G1 | ENSG00000149474 | CSRP2BP |
| ENSG00000115866 | DARS | ENSG00000102738 | MRPS31 |
| ENSG00000204628 | GNB2L1 | ENSG00000136104 | RNASEH2B |
| ENSG00000198242 | RPL23A | ENSG00000106246 | PTCD1 |
| ENSG00000158526 | TSR2 | ENSG00000248919 | ATP5J2-PTCD1 |
| ENSG00000125450 | NUP85 | ENSG00000138663 | COPS4 |
| ENSG00000134371 | CDC73 | ENSG00000115368 | WDR75 |
| ENSG00000164941 | INTS8 | ENSG00000128564 | VGF |
| ENSG00000055483 | USP36 | ENSG00000128191 | DGCR8 |
| ENSG00000258366 | RTEL1 | ENSG00000008294 | SPAG9 |
| ENSG00000188846 | RPL14 | ENSG00000131475 | VPS25 |
| ENSG00000247626 | MARS2 | ENSG00000105523 | FAM83E |
| ENSG00000095787 | WAC | ENSG00000172269 | DPAGT1 |
| ENSG00000108094 | CUL2 | ENSG00000170312 | CDK1 |
| ENSG00000185946 | RNPC3 | ENSG00000104131 | EIF3J |
| ENSG00000154473 | BUB3 | ENSG00000150753 | CCT5 |
| ENSG00000204394 | VARS | ENSG00000140443 | IGF1R |
| ENSG00000103051 | COG4 | ENSG00000010292 | NCAPD2 |
| ENSG00000104738 | MCM4 | ENSG00000171763 | SPATA5L1 |
| ENSG00000117222 | RBBP5 | ENSG00000180098 | TRNAU1AP |
| ENSG00000082516 | GEMIN5 | ENSG00000168374 | ARF4 |
| ENSG00000100162 | CENPM | ENSG00000173812 | EIF1 |
| ENSG00000141456 | PELP1 | ENSG00000100554 | ATP6V1D |
| ENSG00000137807 | KIF23 | ENSG00000072756 | TRNT1 |
| ENSG00000112685 | EXOC2 | ENSG00000135372 | NAT10 |
| ENSG00000125995 | ROMO1 | ENSG00000178394 | HTR1A |
| ENSG00000136891 | TEX10 | ENSG00000128272 | ATF4 |
| ENSG00000173113 | TRMT112 | ENSG00000204070 | SYS1 |
| ENSG00000075914 | EXOSC7 | ENSG00000137815 | RTF1 |
| ENSG00000119523 | ALG2 | ENSG00000198026 | ZNF335 |
| ENSG00000244038 | DDOST | ENSG00000117410 | ATP6V0B |
| ENSG00000108175 | ZMIZ1 | ENSG00000112739 | PRPF4B |
| ENSG00000129691 | ASH2L | ENSG00000129347 | KRI1 |
| ENSG00000183207 | RUVBL2 | ENSG00000221818 | EBF2 |
| ENSG00000055044 | NOP58 | ENSG00000198431 | TXNRD1 |
| ENSG00000204315 | FKBPL | ENSG00000104979 | C19orf53 |
| ENSG00000187522 | HSPA14 | ENSG00000136709 | WDR33 |
| ENSG00000169375 | SIN3A | ENSG00000149100 | EIF3M |
| ENSG00000143748 | NVL | ENSG00000125835 | SNRPB |
| ENSG00000021776 | AQR | ENSG00000116698 | SMG7 |
| ENSG00000132467 | UTP3 | ENSG00000087586 | AURKA |
| ENSG00000087470 | DNM1L | ENSG00000169230 | PRELID1 |
| ENSG00000130811 | EIF3G | ENSG00000143799 | PARP1 |
| ENSG00000180198 | RCC1 | ENSG00000146731 | CCT6A |
| ENSG00000101407 | TTI1 | ENSG00000163877 | SNIP1 |
| ENSG00000116455 | WDR77 | ENSG00000215421 | ZNF407 |
| ENSG00000135763 | URB2 | ENSG00000197724 | PHF2 |
| ENSG00000133316 | WDR74 | ENSG00000172590 | MRPL52 |
| ENSG00000189091 | SF3B3 | ENSG00000175203 | DCTN2 |
| ENSG00000109917 | ZNF259 | ENSG00000149273 | RPS3 |
| ENSG00000130640 | TUBGCP2 | ENSG00000204822 | MRPL53 |
| ENSG00000011376 | LARS2 | ENSG00000109775 | UFSP2 |
| ENSG00000135249 | RINT1 | ENSG00000165733 | BMS1 |
| ENSG00000126883 | NUP214 | ENSG00000104671 | DCTN6 |
| ENSG00000163510 | CWC22 | ENSG00000175224 | ATG13 |
| ENSG00000101138 | CSTF1 | ENSG00000142541 | RPL13A |
| ENSG00000104221 | BRF2 | ENSG00000173805 | HAP1 |
| ENSG00000125630 | POLR1B | ENSG00000115750 | TAF1B |
| ENSG00000083896 | YTHDC1 | ENSG00000165688 | PMPCA |
| ENSG00000105726 | ATP13A1 | ENSG00000159720 | ATP6V0D1 |
| ENSG00000105618 | PRPF31 | ENSG00000074201 | CLNS1A |
| ENSG00000117748 | RPA2 | ENSG00000158417 | EIF5B |
| ENSG00000143294 | PRCC | ENSG00000196588 | MKL1 |
| ENSG00000156239 | N6AMT1 | ENSG00000138614 | VWA9 |
| ENSG00000143384 | MCL1 | ENSG00000124571 | XPO5 |
| ENSG00000113407 | TARS | ENSG00000198000 | NOL8 |
| ENSG00000086589 | RBM22 | ENSG00000181991 | MRPS11 |
| ENSG00000133119 | RFC3 | ENSG00000149823 | VPS51 |
| ENSG00000052749 | RRP12 | ENSG00000151348 | EXT2 |
| ENSG00000103047 | TANGO6 | ENSG00000162396 | PARS2 |
| ENSG00000142751 | GPN2 | ENSG00000204843 | DCTN1 |
| ENSG00000101057 | MYBL2 | ENSG00000177302 | TOP3A |
| ENSG00000176915 | ANKLE2 | ENSG00000142684 | ZNF593 |
| ENSG00000071127 | WDR1 | ENSG00000074800 | ENO1 |
| ENSG00000106344 | RBM28 | ENSG00000167513 | CDT1 |
| ENSG00000100316 | RPL3 | ENSG00000141101 | NOB1 |
| ENSG00000139131 | YARS2 | ENSG00000047315 | POLR2B |
| ENSG00000182831 | C16orf72 | ENSG00000131966 | ACTR10 |
| ENSG00000167325 | RRM1 | ENSG00000115875 | SRSF7 |
| ENSG00000172262 | ZNF131 | ENSG00000186141 | POLR3C |
| ENSG00000007168 | PAFAH1B1 | ENSG00000108424 | KPNB1 |
| ENSG00000117174 | ZNHIT6 | ENSG00000111845 | PAK1IP1 |
| ENSG00000196497 | IPO4 | ENSG00000148832 | PAOX |
| ENSG00000188566 | NDOR1 | ENSG00000156017 | C9orf41 |
| ENSG00000183091 | NEB | ENSG00000198901 | PRC1 |
| ENSG00000011304 | PTBP1 | ENSG00000134001 | EIF2S1 |
| ENSG00000109805 | NCAPG | ENSG00000146918 | NCAPG2 |
| ENSG00000123154 | WDR83 | ENSG00000144713 | RPL32 |
| ENSG00000147416 | ATP6V1B2 | ENSG00000185122 | HSF1 |
| ENSG00000163961 | RNF168 | ENSG00000167658 | EEF2 |
| ENSG00000163811 | WDR43 | ENSG00000164190 | NIPBL |
| ENSG00000143624 | INTS3 | ENSG00000163902 | RPN1 |
| ENSG00000101161 | PRPF6 | ENSG00000244045 | TMEM199 |
| ENSG00000130726 | TRIM28 | ENSG00000143476 | DTL |
| ENSG00000165494 | PCF11 | ENSG00000149503 | INCENP |
| ENSG00000053900 | ANAPC4 | ENSG00000071243 | ING3 |
| ENSG00000168255 | POLR2J3 | ENSG00000186073 | C15orf41 |
| ENSG00000129534 | MIS18BP1 | ENSG00000088836 | SLC4A11 |
| ENSG00000164754 | RAD21 | ENSG00000136273 | HUS1 |
| ENSG00000120158 | RCL1 | ENSG00000005007 | UPF1 |
| ENSG00000161016 | RPL8 | ENSG00000070010 | UFD1L |
| ENSG00000030066 | NUP160 | ENSG00000106263 | EIF3B |
| ENSG00000099624 | ATP5D | ENSG00000213024 | NUP62 |
| ENSG00000116120 | FARSB | ENSG00000067191 | CACNB1 |
| ENSG00000115233 | PSMD14 | ENSG00000179091 | CYC1 |
| ENSG00000086504 | MRPL28 | ENSG00000113312 | TTC1 |
| ENSG00000160752 | FDPS | ENSG00000085831 | TTC39A |
| ENSG00000049541 | RFC2 | ENSG00000118197 | DDX59 |
| ENSG00000148688 | RPP30 | ENSG00000134871 | COL4A2 |
| ENSG00000114573 | ATP6V1A | ENSG00000088986 | DYNLL1 |
| ENSG00000086200 | IPO11 | ENSG00000138778 | CENPE |
| ENSG00000119720 | NRDE2 | ENSG00000106244 | PDAP1 |
| ENSG00000058262 | SEC61A1 | ENSG00000177600 | RPLP2 |
| ENSG00000073111 | MCM2 | ENSG00000112081 | SRSF3 |
| ENSG00000138160 | KIF11 | ENSG00000100413 | POLR3H |
| ENSG00000215193 | PEX26 | ENSG00000172508 | CARNS1 |
| ENSG00000161057 | PSMC2 | ENSG00000147123 | NDUFB11 |
| ENSG00000187514 | PTMA | ENSG00000119953 | SMNDC1 |
| ENSG00000135829 | DHX9 | ENSG00000111640 | GAPDH |
| ENSG00000058729 | RIOK2 | ENSG00000117899 | MESDC2 |
| ENSG00000110330 | BIRC2 | ENSG00000075624 | ACTB |
| ENSG00000141759 | TXNL4A | ENSG00000163166 | IWS1 |
| ENSG00000166986 | MARS | ENSG00000114503 | NCBP2 |
| ENSG00000153774 | CFDP1 | ENSG00000198522 | GPN1 |
| ENSG00000130177 | CDC16 | ENSG00000099899 | TRMT2A |
| ENSG00000241553 | ARPC4 | ENSG00000181544 | FANCB |
| ENSG00000132604 | TERF2 | ENSG00000136982 | DSCC1 |
| ENSG00000114982 | KANSL3 | ENSG00000068366 | ACSL4 |
| ENSG00000213780 | GTF2H4 | ENSG00000062716 | VMP1 |
| ENSG00000139343 | SNRPF | ENSG00000111802 | TDP2 |
| ENSG00000101189 | MRGBP | ENSG00000185627 | PSMD13 |
| ENSG00000079246 | XRCC5 | ENSG00000020426 | MNAT1 |
| ENSG00000196943 | NOP9 | ENSG00000113734 | BNIP1 |
| ENSG00000122965 | RBM19 | ENSG00000102241 | HTATSF1 |
| ENSG00000132383 | RPA1 | ENSG00000160789 | LMNA |
| ENSG00000094880 | CDC23 | ENSG00000062822 | POLD1 |
| ENSG00000213639 | PPP1CB | ENSG00000168944 | CEP120 |
| ENSG00000109911 | ELP4 | ENSG00000139718 | SETD1B |
| ENSG00000180957 | PITPNB | ENSG00000132792 | CTNNBL1 |
| ENSG00000122257 | RBBP6 | ENSG00000173540 | GMPPB |
| ENSG00000173145 | NOC3L | ENSG00000128789 | PSMG2 |
| ENSG00000179115 | FARSA | ENSG00000196365 | LONP1 |
| ENSG00000105171 | POP4 | ENSG00000160214 | RRP1 |
| ENSG00000148303 | RPL7A | ENSG00000179041 | RRS1 |
| ENSG00000167508 | MVD | ENSG00000143106 | PSMA5 |
| ENSG00000115541 | HSPE1 | ENSG00000168411 | RFWD3 |
| ENSG00000170445 | HARS | ENSG00000073584 | SMARCE1 |
| ENSG00000168496 | FEN1 | ENSG00000175334 | BANF1 |
| ENSG00000141367 | CLTC | ENSG00000077152 | UBE2T |
| ENSG00000087191 | PSMC5 | ENSG00000173611 | SCAI |
| ENSG00000163159 | VPS72 | ENSG00000171720 | HDAC3 |
| ENSG00000130741 | EIF2S3 | ENSG00000182197 | EXT1 |
| ENSG00000168495 | POLR3D | ENSG00000114346 | ECT2 |
| ENSG00000071894 | CPSF1 | ENSG00000124214 | STAU1 |
| ENSG00000058600 | POLR3E | ENSG00000126254 | RBM42 |
| ENSG00000100726 | TELO2 | ENSG00000127184 | COX7C |
| ENSG00000165501 | LRR1 | ENSG00000174276 | ZNHIT2 |
| ENSG00000113575 | PPP2CA | ENSG00000177971 | IMP3 |
| ENSG00000116922 | Clorf109 | ENSG00000104872 | PIH1D1 |
| ENSG00000073712 | FERMT2 | ENSG00000132155 | RAF1 |
| ENSG00000174437 | ATP2A2 | ENSG00000163872 | YEATS2 |
| ENSG00000176407 | KCMF1 | ENSG00000119906 | FAM178A |
| ENSG00000140525 | FANCI | ENSG00000217930 | PAM16 |
| ENSG00000101182 | PSMA7 | ENSG00000197498 | RPF2 |
| ENSG00000130204 | TOMM40 | ENSG00000130348 | QRSL1 |
| ENSG00000239306 | RBM14 | ENSG00000147536 | GINS4 |
| ENSG00000248643 | RBM14-RBM4 | ENSG00000174748 | RPL15 |
| ENSG00000172113 | NME6 | ENSG00000159147 | DONSON |
| ENSG00000136448 | NMT1 | ENSG00000157593 | SLC35B2 |
| ENSG00000186166 | CCDC84 | ENSG00000181938 | GINS3 |
| ENSG00000166233 | ARIH1 | ENSG00000187446 | CHP1 |
| ENSG00000111877 | MCM9 | ENSG00000070371 | CLTCL1 |
| ENSG00000204316 | MRPL38 | ENSG00000096063 | SRPK1 |
| ENSG00000101868 | POLA1 | ENSG00000141564 | RPTOR |
| ENSG00000107951 | MTPAP | ENSG00000108474 | PIGL |
| ENSG00000039650 | PNKP | ENSG00000187741 | FANCA |
| ENSG00000123064 | DDX54 | ENSG00000213465 | ARL2 |
| ENSG00000183955 | SETD8 | ENSG00000117593 | DARS2 |
| ENSG00000138107 | ACTR1A | ENSG00000171863 | RPS7 |
| ENSG00000244005 | NFS1 | ENSG00000117395 | EBNA1BP2 |
| ENSG00000188986 | NELFB | ENSG00000111142 | METAP2 |
| ENSG00000018699 | TTC27 | ENSG00000113272 | THG1L |
| ENSG00000167112 | TRUB2 | ENSG00000117360 | PRPF3 |
| ENSG00000100393 | EP300 | ENSG00000221978 | CCNL2 |
| ENSG00000101639 | CEP192 | ENSG00000163832 | ELP6 |
| ENSG00000126461 | SCAF1 | ENSG00000108852 | MPP2 |
| ENSG00000172171 | TEFM | ENSG00000175832 | ETV4 |
| ENSG00000135913 | USP37 | ENSG00000185359 | HGS |
| ENSG00000135624 | CCT7 | ENSG00000120705 | ETF1 |
| ENSG00000100804 | PSMB5 | ENSG00000108384 | RAD51C |
| ENSG00000175792 | RUVBL1 | ENSG00000036257 | CUL3 |
| ENSG00000183431 | SF3A3 | ENSG00000152382 | TADA1 |
| ENSG00000108773 | KAT2A | ENSG00000114742 | WDR48 |
| ENSG00000100949 | RABGGTA | ENSG00000214026 | MRPL23 |
| ENSG00000151503 | NCAPD3 | ENSG00000105671 | DDX49 |
| ENSG00000111880 | RNGTT | ENSG00000104731 | KLHDC4 |
| ENSG00000168883 | USP39 | ENSG00000010256 | UQCRC1 |
| ENSG00000151461 | UPF2 | ENSG00000154743 | TSEN2 |
| ENSG00000105486 | LIG1 | ENSG00000178896 | EXOSC4 |
| ENSG00000111300 | NAA25 | ENSG00000168393 | DTYMK |
| ENSG00000144559 | TAMM41 | ENSG00000035928 | RFC1 |
| ENSG00000137574 | TGS1 | ENSG00000048707 | VPS13D |
| ENSG00000172273 | HINFP | ENSG00000154832 | CXXC1 |
| ENSG00000133112 | TPT1 | ENSG00000130985 | UBA1 |
| ENSG00000167986 | DDB1 | ENSG00000065150 | IPO5 |
| ENSG00000125319 | C17orf53 | ENSG00000161800 | RACGAP1 |
| ENSG00000113161 | HMGCR | ENSG00000142534 | RPS11 |
| ENSG00000100941 | PNN | ENSG00000136003 | ISCU |
| ENSG00000139697 | SBNO1 | ENSG00000065000 | AP3D1 |
| ENSG00000135336 | ORC3 | ENSG00000100401 | RANGAP1 |
| ENSG00000101115 | SALL4 | ENSG00000196230 | TUBB |
| ENSG00000100902 | PSMA6 | ENSG00000181555 | SETD2 |
| ENSG00000141141 | DDX52 | ENSG00000055950 | MRPL43 |
| ENSG00000254093 | PINX1 | ENSG00000188389 | PDCD1 |
| ENSG00000184445 | KNTC1 | ENSG00000165684 | SNAPC4 |
| ENSG00000089053 | ANAPC5 | ENSG00000147533 | GOLGA7 |
| ENSG00000111602 | TIMELESS | ENSG00000064313 | TAF2 |
| ENSG00000145592 | RPL37 | ENSG00000137154 | RPS6 |
| ENSG00000106615 | RHEB | ENSG00000104886 | PLEKHJ1 |
| ENSG00000180817 | PPA1 | ENSG00000122882 | ECD |
| ENSG00000110172 | CHORDC1 | ENSG00000184967 | NOC4L |
| ENSG00000137876 | RSL24D1 | ENSG00000088325 | TPX2 |
| ENSG00000104408 | EIF3E | ENSG00000183520 | UTP11L |
| ENSG00000143436 | MRPL9 | ENSG00000179051 | RCC2 |
| ENSG00000108883 | EFTUD2 | ENSG00000157510 | AFAP1L1 |
| ENSG00000140740 | UQCRC2 | ENSG00000066379 | ZNRD1 |
| ENSG00000211456 | SACM1L | ENSG00000172115 | CYCS |
| ENSG00000131051 | RBM39 | ENSG00000086827 | ZW10 |
| ENSG00000136758 | YME1L1 | ENSG00000109534 | GAR1 |
| ENSG00000112578 | BYSL | ENSG00000175387 | SMAD2 |
| ENSG00000163781 | TOPBP1 | ENSG00000115947 | ORC4 |
| ENSG00000106628 | POLD2 | ENSG00000010072 | SPRTN |
| ENSG00000132952 | USPL1 | ENSG00000185163 | DDX51 |
| ENSG00000168538 | TRAPPC11 | ENSG00000177370 | TIMM22 |
| ENSG00000168488 | ATXN2L | ENSG00000076924 | XAB2 |
| ENSG00000022277 | RTFDC1 | ENSG00000124562 | SNRPC |
| ENSG00000179988 | PSTK | ENSG00000127586 | CHTF18 |
| ENSG00000092199 | HNRNPC | ENSG00000066117 | SMARCD1 |
| ENSG00000156831 | NSMCE2 | ENSG00000177494 | ZBED2 |
| ENSG00000125691 | RPL23 | ENSG00000133401 | PDZD2 |
| ENSG00000083520 | DIS3 | ENSG00000127554 | GFER |
| ENSG00000115761 | NOL10 | ENSG00000117697 | NSL1 |
| ENSG00000173894 | CBX2 | ENSG00000184659 | FOXD4L4 |
| ENSG00000243147 | MRPL33 | ENSG00000204828 | FOXD4L2 |
| ENSG00000139618 | BRCA2 | ENSG00000110200 | ANAPC15 |
| ENSG00000109519 | GRPEL1 | ENSG00000169291 | SHE |
| ENSG00000203760 | CENPW | ENSG00000132313 | MRPL35 |
| ENSG00000166851 | PLK1 | ENSG00000115816 | CEBPZ |
| ENSG00000121579 | NAA50 | ENSG00000243667 | WDR92 |
| ENSG00000163608 | C3orf17 | ENSG00000107959 | PITRM1 |
| ENSG00000005075 | POLR2J | ENSG00000103035 | PSMD7 |
| ENSG00000148606 | POLR3A | ENSG00000163946 | FAM208A |
| ENSG00000160949 | TONSL | ENSG00000178057 | NDUFAF3 |
| ENSG00000128159 | TUBGCP6 | ENSG00000170540 | ARL6IP1 |
| ENSG00000125449 | ARMC7 | ENSG00000091009 | RBM27 |
| ENSG00000122406 | RPL5 | ENSG00000205609 | EIF3CL |
| ENSG00000126226 | PCID2 | ENSG00000165526 | RPUSD4 |
| ENSG00000159377 | PSMB4 | ENSG00000120314 | WDR55 |
| ENSG00000167967 | E4F1 | ENSG00000013275 | PSMC4 |
| ENSG00000141076 | CIRH1A | ENSG00000131931 | THAP1 |
| ENSG00000069248 | NUP133 | ENSG00000155660 | PDIA4 |
| ENSG00000242372 | EIF6 | ENSG00000162607 | USP1 |
| ENSG00000087269 | NOP14 | ENSG00000109606 | DHX15 |
| ENSG00000163468 | CCT3 | ENSG00000261949 | LOC100507003 |
| ENSG00000140326 | CDAN1 | ENSG00000130589 | HELZ2 |
| ENSG00000146834 | MEPCE | ENSG00000145734 | BDP1 |
| ENSG00000143222 | UFC1 | ENSG00000103194 | USP10 |
| ENSG00000110871 | COQ5 | ENSG00000076201 | PTPN23 |
| ENSG00000119285 | HEATR1 | ENSG00000140854 | KATNB1 |
| ENSG00000145386 | CCNA2 | ENSG00000164053 | ATRIP |
| ENSG00000164109 | MAD2L1 | ENSG00000167088 | SNRPD1 |
| ENSG00000185347 | C14orf80 | ENSG00000154781 | CCDC174 |
| ENSG00000134748 | PRPF38A | ENSG00000115446 | UNC50 |
| ENSG00000070061 | IKBKAP | ENSG00000177700 | POLR2L |
| ENSG00000099995 | SF3A1 | ENSG00000162063 | CCNF |
| ENSG00000100029 | PES1 | ENSG00000152904 | GGPS1 |
| ENSG00000130255 | RPL36 | ENSG00000151657 | KIN |
| ENSG00000085231 | AK6 | ENSG00000182810 | DDX28 |
| ENSG00000187145 | MRPS21 | ENSG00000006744 | ELAC2 |
| ENSG00000062650 | WAPAL | ENSG00000116898 | MRPS15 |
| ENSG00000122484 | RPAP2 | ENSG00000255072 | PIGY |
| ENSG00000090861 | AARS | ENSG00000130332 | LSM7 |
| ENSG00000161888 | SPC24 | ENSG00000051180 | RAD51 |
| ENSG00000087087 | SRRT | ENSG00000178171 | AMER3 |
| ENSG00000134910 | STT3A | ENSG00000254901 | MEF2BNB |
| ENSG00000161526 | SAP30BP | ENSG00000149925 | ALDOA |
| ENSG00000068654 | POLR1A | ENSG00000100604 | CHGA |
| ENSG00000140983 | RHOT2 | ENSG00000172602 | RND1 |
| ENSG00000184708 | EIF4ENIF1 | ENSG00000138592 | USP8 |
| ENSG00000100479 | POLE2 | ENSG00000172613 | RAD9A |
| ENSG00000134440 | NARS | ENSG00000132196 | HSD17B7 |
| ENSG00000014164 | ZC3H3 | ENSG00000151849 | CENPJ |
| ENSG00000113812 | ACTR8 | ENSG00000105221 | AKT2 |
| ENSG00000145331 | TRMT10A | ENSG00000185504 | C17orf70 |
| ENSG00000110104 | CCDC86 | ENSG00000025796 | SEC63 |
| ENSG00000164163 | ABCE1 | ENSG00000168438 | CDC40 |
| ENSG00000167863 | ATP5H | ENSG00000163918 | RFC4 |
| ENSG00000176946 | THAP4 | ENSG00000152147 | GEMIN6 |
| ENSG00000169251 | NMD3 | ENSG00000166887 | VPS39 |
| ENSG00000166226 | CCT2 | ENSG00000018625 | ATP1A2 |
| ENSG00000131747 | TOP2A | ENSG00000163346 | PBXIP1 |
| ENSG00000267673 | FDX1L | ENSG00000135966 | TGFBRAP1 |
| ENSG00000108559 | NUP88 | ENSG00000099901 | RANBP1 |
| ENSG00000104957 | CCDC130 | ENSG00000010327 | STAB1 |
| ENSG00000167522 | ANKRD11 | ENSG00000163344 | PMVK |
| ENSG00000130706 | ADRM1 | ENSG00000102921 | N4BP1 |
| ENSG00000048162 | NOP16 | ENSG00000177150 | FAM210A |
| ENSG00000159210 | SNF8 | ENSG00000158042 | MRPL17 |
| ENSG00000113360 | DROSHA | ENSG00000124659 | TBCC |
| ENSG00000108296 | CWC25 | ENSG00000113593 | PPWD1 |
| ENSG00000161395 | PGAP3 | ENSG00000188306 | LRRIQ4 |
| ENSG00000089195 | TRMT6 | ENSG00000074966 | TXK |
| ENSG00000185838 | GNB1L | ENSG00000228049 | POLR2J2 |
| ENSG00000101146 | RAE1 | ENSG00000133226 | SRRM1 |
| ENSG00000092853 | CLSPN | ENSG00000121577 | POPDC2 |
| ENSG00000107949 | BCCIP | ENSG00000130876 | SLC7A10 |
| ENSG00000159079 | C21orf59 | ENSG00000130810 | PPAN |
| ENSG00000137947 | GTF2B | ENSG00000243207 | PPAN-P2RY11 |
| ENSG00000160948 | VPS28 | ENSG00000081248 | CACNA1S |
| ENSG00000065427 | KARS | ENSG00000153201 | RANBP2 |
| ENSG00000102978 | POLR2C | ENSG00000126698 | DNAJC8 |
| ENSG00000182154 | MRPL41 | ENSG00000103018 | CYB5B |
| ENSG00000139168 | ZCRB1 | ENSG00000130816 | DNMT1 |
| ENSG00000175110 | MRPS22 | ENSG00000102103 | PQBP1 |
| ENSG00000177084 | POLE | ENSG00000120253 | NUP43 |
| ENSG00000197681 | TBC1D3 | ENSG00000164327 | RICTOR |
| ENSG00000053501 | USE1 | ENSG00000139719 | VPS33A |
| ENSG00000121879 | PIK3CA | ENSG00000168566 | SNRNP48 |
| ENSG00000108278 | ZNHIT3 | ENSG00000063244 | U2AF2 |
| ENSG00000161547 | SRSF2 | ENSG00000108423 | TUBD1 |
| ENSG00000129083 | COPB1 | ENSG00000164880 | INTS1 |
| ENSG00000012048 | BRCA1 | ENSG00000148297 | MED22 |
| ENSG00000171314 | PGAM1 | ENSG00000185825 | BCAP31 |
| ENSG00000112159 | MDN1 | ENSG00000084623 | EIF3I |
| ENSG00000174243 | DDX23 | ENSG00000066422 | ZBTB11 |
| ENSG00000096401 | CDC5L | ENSG00000119041 | GTF3C3 |
| ENSG00000128513 | POT1 | ENSG00000083093 | PALB2 |
| ENSG00000071859 | FAM50A | ENSG00000120699 | EXOSC8 |
| ENSG00000100084 | HIRA | ENSG00000166135 | HIF1AN |
| ENSG00000100813 | ACIN1 | ENSG00000188976 | NOC2L |
| ENSG00000005100 | DHX33 | ENSG00000102974 | CTCF |
| ENSG00000101158 | NELFCD | ENSG00000148229 | POLE3 |
| ENSG00000115946 | PNO1 | ENSG00000167118 | URM1 |
| ENSG00000188647 | PTAR1 | ENSG00000176386 | CDC26 |
| ENSG00000146007 | ZMAT2 | ENSG00000110063 | DCPS |
| ENSG00000241837 | ATP5O | ENSG00000089737 | DDX24 |
| ENSG00000113643 | RARS | ENSG00000119383 | PPP2R4 |
| ENSG00000162521 | RBBP4 | ENSG00000143319 | ISG20L2 |
| ENSG00000116830 | TTF2 | ENSG00000141552 | ANAPC11 |
| ENSG00000187555 | USP7 | ENSG00000155506 | LARP1 |
| ENSG00000137216 | TMEM63B | ENSG00000144867 | SRPRB |
| ENSG00000161904 | LEMD2 | ENSG00000093000 | NUP50 |
| ENSG00000241945 | PWP2 | ENSG00000107937 | GTPBP4 |
| ENSG00000134982 | APC | ENSG00000083635 | NUFIP1 |
| ENSG00000156983 | BRPF1 | ENSG00000174527 | MYO1H |
| ENSG00000164346 | NSA2 | ENSG00000124641 | MED20 |
| ENSG00000223496 | EXOSC6 | ENSG00000240694 | PNMA2 |
| ENSG00000113569 | NUP155 | ENSG00000122012 | SV2C |
| ENSG00000080986 | NDC80 | ENSG00000017260 | ATP2C1 |
| ENSG00000143374 | TARS2 | ENSG00000179965 | ZNF771 |
| ENSG00000104835 | SARS2 | ENSG00000126216 | TUBGCP3 |
| ENSG00000152253 | SPC25 | ENSG00000126814 | TRMT5 |
| ENSG00000088356 | PDRG1 | ENSG00000101945 | SUV39H1 |
| ENSG00000044574 | HSPA5 | ENSG00000182185 | RAD51B |
| ENSG00000116874 | WARS2 | ENSG00000163681 | SLMAP |
| ENSG00000204531 | POU5F1 | ENSG00000179295 | PTPN11 |
| ENSG00000004779 | NDUFAB1 | ENSG00000004487 | KDM1A |
| ENSG00000161981 | SNRNP25 | ENSG00000136100 | VPS36 |
| ENSG00000126457 | PRMT1 | ENSG00000168066 | SF1 |
| ENSG00000142507 | PSMB6 | ENSG00000197181 | PIWIL2 |
| ENSG00000164808 | SPIDR | ENSG00000128908 | INO80 |
| ENSG00000234972 | TBC1D3C | ENSG00000102144 | PGK1 |
| ENSG00000144554 | FANCD2 | ENSG00000007923 | DNAJC11 |
| ENSG00000147383 | NSDHL | ENSG00000143514 | TP53BP2 |
| ENSG00000165732 | DDX21 | ENSG00000076650 | GPATCH1 |
| ENSG00000155975 | VPS37A | ENSG00000130749 | ZC3H4 |
| ENSG00000002822 | MAD1L1 | ENSG00000062582 | MRPS24 |
| ENSG00000179271 | GADD45GIP1 | ENSG00000087085 | ACHE |
| ENSG00000101452 | DHX35 | ENSG00000197976 | AKAP17A |
| ENSG00000074071 | MRPS34 | ENSG00000100028 | SNRPD3 |
| ENSG00000169045 | HNRNPH1 | ENSG00000128731 | HERC2 |
| ENSG00000087510 | TFAP2C | ENSG00000134014 | ELP3 |
| ENSG00000105819 | PMPCB | ENSG00000181163 | NPM1 |
| ENSG00000204351 | SKIV2L | ENSG00000148444 | COMMD3 |
| ENSG00000160783 | PMF1 | ENSG00000095319 | NUP188 |
| ENSG00000152234 | ATP5A1 | ENSG00000169564 | PCBP1 |
| ENSG00000127463 | EMC1 | ENSG00000182208 | MOB2 |
| ENSG00000124228 | DDX27 | ENSG00000055070 | SZRD1 |
| ENSG00000100319 | ZMAT5 | ENSG00000182473 | EXOC7 |
| ENSG00000065183 | WDR3 | ENSG00000136930 | PSMB7 |
| ENSG00000058272 | PPP1R12A | ENSG00000107863 | ARHGAP21 |
| ENSG00000136628 | EPRS | ENSG00000197223 | C1D |
| ENSG00000163017 | ACTG2 | ENSG00000184270 | HIST2H2AB |
| ENSG00000104884 | ERCC2 | ENSG00000161036 | LRWD1 |
| ENSG00000166483 | WEE1 | ENSG00000144736 | SHQ1 |
| ENSG00000135837 | CEP350 | ENSG00000137100 | DCTN3 |
| ENSG00000104897 | SF3A2 | ENSG00000131149 | GSE1 |
| ENSG00000140598 | EFTUD1 | ENSG00000214753 | HNRNPUL2 |
| ENSG00000143774 | GUK1 | ENSG00000111358 | GTF2H3 |
| ENSG00000085721 | RRN3 | ENSG00000147677 | EIF3H |
| ENSG00000172053 | QARS | ENSG00000125676 | THOC2 |
| ENSG00000165934 | CPSF2 | ENSG00000149554 | CHEK1 |
| ENSG00000052802 | MSMO1 | ENSG00000176476 | CCDC101 |
| ENSG00000135476 | ESPL1 | ENSG00000147596 | PRDM14 |
| ENSG00000174177 | CTU2 | ENSG00000092094 | OSGEP |
| ENSG00000120438 | TCP1 | ENSG00000155393 | HEATR3 |
| ENSG00000170892 | TSEN34 | ENSG00000083845 | RPS5 |
| ENSG00000204574 | ABCF1 | ENSG00000148296 | SURF6 |
| ENSG00000175376 | EIF1AD | ENSG00000162613 | FUBP1 |
| ENSG00000146263 | MMS22L | ENSG00000182220 | ATP6AP2 |
| ENSG00000121022 | COPS5 | ENSG00000115163 | CENPA |
| ENSG00000168090 | COPS6 | ENSG00000176225 | RTTN |
| ENSG00000167491 | GATAD2A | ENSG00000176208 | ATAD5 |
| ENSG00000084072 | PPIE | ENSG00000254827 | SLC22A18AS |
| ENSG00000115268 | RPS15 | ENSG00000128708 | HAT1 |
| ENSG00000163938 | GNL3 | ENSG00000106400 | ZNHIT1 |
| ENSG00000151665 | PIGF | ENSG00000123219 | CENPK |
| ENSG00000148843 | PDCD11 | ENSG00000264424 | MYH4 |
| ENSG00000141736 | ERBB2 | ENSG00000066468 | FGFR2 |
| ENSG00000103168 | TAF1C | ENSG00000095059 | DHPS |
| ENSG00000105401 | CDC37 | ENSG00000110921 | MVK |
| ENSG00000163933 | RFT1 | ENSG00000141556 | TBCD |
| ENSG00000122085 | MTERFD2 | ENSG00000196305 | IARS |
| ENSG00000164032 | H2AFZ | ENSG00000131055 | COX4I2 |
| ENSG00000140943 | MBTPS1 | ENSG00000153789 | FAM92B |
| ENSG00000198952 | SMG5 | ENSG00000088930 | XRN2 |
| ENSG00000169021 | UQCRFS1 | ENSG00000145220 | LYAR |
| ENSG00000013810 | TACC3 | ENSG00000172809 | RPL38 |
| ENSG00000105258 | POLR2I | ENSG00000108788 | MLX |
| ENSG00000167978 | SRRM2 | ENSG00000197170 | PSMD12 |
| ENSG00000095564 | BTAF1 | ENSG00000225899 | FRG2B |
| ENSG00000138095 | LRPPRC | ENSG00000174886 | NDUFA11 |
| ENSG00000063978 | RNF4 | ENSG00000172058 | SERF1A |
| ENSG00000162368 | CMPK1 | ENSG00000205572 | SERF1B |
| ENSG00000140829 | DHX38 | ENSG00000242485 | MRPL20 |
| ENSG00000158169 | FANCC | ENSG00000089225 | TBX5 |
| ENSG00000161960 | EIF4A1 | ENSG00000149428 | HYOU1 |
| ENSG00000181222 | POLR2A | ENSG00000166595 | FAM96B |
| ENSG00000165916 | PSMC3 | ENSG00000131462 | TUBG1 |
| ENSG00000198060 | MARCH5 | ENSG00000185990 | F8A3 |
| ENSG00000149923 | PPP4C | ENSG00000197932 | F8A1 |
| ENSG00000111667 | USP5 | ENSG00000198444 | F8A2 |
| ENSG00000198755 | RPL10A | ENSG00000031823 | RANBP3 |
| ENSG00000141499 | WRAP53 | ENSG00000100353 | EIF3D |
| ENSG00000093009 | CDC45 | ENSG00000163605 | PPP4R2 |
| ENSG00000105732 | ZNF574 | ENSG00000164162 | ANAPC10 |
| ENSG00000104064 | GABPB1 | ENSG00000132153 | DHX30 |
| ENSG00000108294 | PSMB3 | ENSG00000154723 | ATP5J |
| ENSG00000130856 | ZNF236 | ENSG00000182256 | GABRG3 |
| ENSG00000133980 | VRTN | ENSG00000119487 | MAPKAP1 |
| ENSG00000149308 | NPAT | ENSG00000132394 | EEFSEC |
| ENSG00000120071 | KANSL1 | ENSG00000122952 | ZWINT |
| ENSG00000129084 | PSMA1 | ENSG00000131042 | LILRB2 |
| ENSG00000117877 | CD3EAP | ENSG00000222004 | C7orf71 |
| ENSG00000127616 | SMARCA4 | ENSG00000168802 | CHTF8 |
| ENSG00000163882 | POLR2H | ENSG00000069849 | ATP1B3 |
| ENSG00000183718 | TRIM52 | ENSG00000074582 | BCS1L |
| ENSG00000106803 | SEC61B | ENSG00000103126 | AXIN1 |
| ENSG00000114942 | EEF1B2 | ENSG00000187144 | SPATA21 |
| ENSG00000067704 | IARS2 | ENSG00000221914 | PPP2R2A |
| ENSG00000114686 | MRPL3 | ENSG00000163386 | NBPF10 |
| ENSG00000172315 | TP53RK | ENSG00000134987 | WDR36 |
| ENSG00000173120 | KDM2A | ENSG00000132300 | PTCD3 |
| ENSG00000138442 | WDR12 | ENSG00000156931 | VPS8 |
| ENSG00000145982 | FARS2 | ENSG00000165632 | TAF3 |
| ENSG00000117481 | NSUN4 | ENSG00000044115 | CTNNA1 |
| ENSG00000142676 | RPL11 | ENSG00000035403 | VCL |
| ENSG00000164615 | CAMLG | ENSG00000088256 | GNA11 |
| ENSG00000138073 | PREB | ENSG00000164334 | FAM170A |
| ENSG00000136888 | ATP6V1G1 | ENSG00000166225 | FRS2 |
| ENSG00000221829 | FANCG | ENSG00000241186 | TDGF1 |
| ENSG00000198887 | SMC5 | ENSG00000196374 | HIST1H2BM |
| ENSG00000102900 | NUP93 | ENSG00000117614 | SYF2 |
| ENSG00000108344 | PSMD3 | ENSG00000154222 | CC2D1B |
| ENSG00000023191 | RNH1 | ENSG00000101367 | MAPRE1 |
| ENSG00000143621 | ILF2 | ENSG00000188186 | LAMTOR4 |
| ENSG00000112855 | HARS2 | ENSG00000166924 | NYAP1 |
| ENSG00000110536 | PTPMT1 | ENSG00000079805 | DNM2 |
| ENSG00000165629 | ATP5C1 | ENSG00000011260 | UTP18 |
| ENSG00000166847 | DCTN5 | ENSG00000089685 | BIRC5 |
| ENSG00000104852 | SNRNP70 | ENSG00000123908 | AGO2 |
| ENSG00000203814 | HIST2H2BF | ENSG00000057935 | MTA3 |
| ENSG00000009413 | REV3L | ENSG00000100811 | YY1 |
| ENSG00000130772 | MED18 | ENSG00000064102 | ASUN |
| ENSG00000079313 | REXO1 | ENSG00000006025 | OSBPL7 |
| ENSG00000012061 | ERCC1 | ENSG00000107372 | ZFAND5 |
| ENSG00000111642 | CHD4 | ENSG00000172922 | RNASEH2C |
| ENSG00000100462 | PRMT5 | ENSG00000075089 | ACTR6 |
| ENSG00000174100 | MRPL45 | ENSG00000165119 | HNRNPK |
| ENSG00000101421 | CHMP4B | ENSG00000182518 | FAM104B |
| ENSG00000144028 | SNRNP200 | ENSG00000041802 | LSG1 |
| ENSG00000108592 | FTSJ3 | ENSG00000206557 | TRIM71 |
| ENSG00000110048 | OSBP | ENSG00000124140 | SLC12A5 |
| ENSG00000147403 | RPL10 | ENSG00000063046 | EIF4B |
| ENSG00000198783 | ZNF830 | ENSG00000126581 | BECN1 |
| ENSG00000179409 | GEMIN4 | ENSG00000171530 | TBCA |
| ENSG00000147604 | RPL7 | ENSG00000206127 | GOLGA8O |
| ENSG00000136824 | SMC2 | ENSG00000167842 | MIS12 |
| ENSG00000104889 | RNASEH2A | ENSG00000033011 | ALG1 |
| ENSG00000146282 | RARS2 | ENSG00000146670 | CDCA5 |
| ENSG00000068784 | SRBD1 | ENSG00000198856 | OSTC |
| ENSG00000137822 | TUBGCP4 | ENSG00000111605 | CPSF6 |
| ENSG00000059691 | PET112 | ENSG00000087365 | SF3B2 |
| ENSG00000066827 | ZFAT | ENSG00000135845 | PIGC |
| ENSG00000148308 | GTF3C5 | ENSG00000100220 | RTCB |
| ENSG00000170185 | USP38 | ENSG00000131876 | SNRPA1 |
| ENSG00000160201 | U2AF1 | ENSG00000115392 | FANCL |
| ENSG00000141258 | SGSM2 | ENSG00000078618 | NRD1 |
| ENSG00000172660 | TAF15 | ENSG00000025770 | NCAPH2 |
| ENSG00000145833 | DDX46 | ENSG00000117682 | DHDDS |
| ENSG00000104980 | TIMM44 | ENSG00000198844 | ARHGEF15 |
| ENSG00000097046 | CDC7 | ENSG00000132603 | NIP7 |
| ENSG00000131368 | MRPS25 | ENSG00000162377 | SELRC1 |
| ENSG00000204209 | DAXX | ENSG00000137411 | VARS2 |
| ENSG00000129696 | TTI2 | ENSG00000064886 | CHI3L2 |
| ENSG00000108848 | LUC7L3 | ENSG00000137806 | NDUFAF1 |
| ENSG00000013573 | DDX11 | ENSG00000133030 | MPRIP |
| ENSG00000105248 | CCDC94 | ENSG00000136935 | GOLGA1 |
| ENSG00000183598 | HIST2H3D | ENSG00000243927 | MRPS6 |
| ENSG00000224226 | TBC1D3B | ENSG00000046647 | GEMIN8 |
| ENSG00000090470 | PDCD7 | ENSG00000133124 | IRS4 |
| ENSG00000031698 | SARS | ENSG00000255346 | NOX5 |
| ENSG00000108270 | AATF | ENSG00000103275 | UBE2I |
| ENSG00000159111 | MRPL10 | ENSG00000165502 | RPL36AL |
| ENSG00000149806 | FAU | ENSG00000100056 | DGCR14 |
| ENSG00000188739 | RBM34 | ENSG00000167972 | ABCA3 |
| ENSG00000152684 | PELO | ENSG00000053372 | MRTO4 |
| ENSG00000174374 | WBSCR16 | ENSG00000169813 | HNRNPF |
| ENSG00000107036 | KIAA1432 | ENSG00000198258 | UBL5 |
| ENSG00000204619 | PPP1R11 | ENSG00000103245 | NARFL |
| ENSG00000091651 | ORC6 | ENSG00000183513 | COA5 |
| ENSG00000134480 | CCNH | ENSG00000174547 | MRPL11 |
| ENSG00000164151 | KIAA0947 | ENSG00000173457 | PPP1R14B |
| ENSG00000164611 | PTTG1 | ENSG00000088038 | CNOT3 |
| ENSG00000111445 | RFC5 | ENSG00000115539 | PDCL3 |
| ENSG00000127481 | UBR4 | ENSG00000118181 | RPS25 |
| ENSG00000159352 | PSMD4 | ENSG00000160075 | SSU72 |
| ENSG00000137814 | HAUS2 | ENSG00000257949 | TEN1 |
| ENSG00000105220 | GPI | ENSG00000168028 | RPSA |
| ENSG00000140521 | POLG | ENSG00000213066 | FGFR1OP |
| ENSG00000075856 | SART3 | ENSG00000143228 | NUF2 |
| ENSG00000143742 | SRP9 | ENSG00000137413 | TAF8 |
| ENSG00000163029 | SMC6 | ENSG00000124207 | CSE1L |
| ENSG00000162227 | TAF6L | ENSG00000080815 | PSEN1 |
| ENSG00000100129 | EIF3L | ENSG00000132773 | TOE1 |
| ENSG00000170348 | TMED10 | ENSG00000129460 | NGDN |
| ENSG00000182217 | HIST2H4B | ENSG00000188613 | NANOS1 |
| ENSG00000183941 | HIST2H4A | ENSG00000163636 | PSMD6 |
| ENSG00000116221 | MRPL37 | ENSG00000146232 | NFKBIE |
| ENSG00000196235 | SUPT5H | ENSG00000135902 | CHRND |
| ENSG00000161920 | MED11 | ENSG00000143641 | GALNT2 |
| ENSG00000134690 | CDCA8 | ENSG00000073969 | NSF |
| ENSG00000131153 | GINS2 | ENSG00000041982 | TNC |
| ENSG00000138018 | EPT1 | ENSG00000108256 | NUFIP2 |
| ENSG00000173141 | MRP63 | ENSG00000198911 | SREBF2 |
| ENSG00000154727 | GABPA | ENSG00000141385 | AFG3L2 |
| ENSG00000120800 | UTP20 | ENSG00000176108 | CHMP6 |
| ENSG00000114767 | RRP9 | ENSG00000257365 | FNTB |
| ENSG00000174231 | PRPF8 | ENSG00000186487 | MYT1L |
| ENSG00000137547 | MRPL15 | ENSG00000127423 | AUNIP |
| ENSG00000146576 | C7orf26 | ENSG00000112110 | MRPL18 |
| ENSG00000065268 | WDR18 | ENSG00000114650 | SCAP |
| ENSG00000147162 | OGT | ENSG00000178104 | PDE4DIP |
| ENSG00000198917 | C9orf114 | ENSG00000105656 | ELL |
| ENSG00000180822 | PSMG4 | ENSG00000186393 | KRT26 |
| ENSG00000125977 | EIF2S2 | ENSG00000124541 | RRP36 |
| ENSG00000173418 | NAA20 | ENSG00000182108 | DEXI |
| ENSG00000155561 | NUP205 | ENSG00000139133 | ALG10 |
| ENSG00000173545 | ZNF622 | ENSG00000082068 | WDR70 |
| ENSG00000127993 | RBM48 | ENSG00000151388 | ADAMTS12 |
| ENSG00000197102 | DYNC1H1 | ENSG00000172172 | MRPL13 |
| ENSG00000119392 | GLE1 | ENSG00000184979 | USP18 |
| ENSG00000174444 | RPL4 | ENSG00000239857 | GET4 |
| ENSG00000149716 | ORAOV1 | ENSG00000069345 | DNAJA2 |
| ENSG00000155876 | RRAGA | ENSG00000073050 | XRCC1 |
| ENSG00000198841 | KTI12 | ENSG00000070985 | TRPM5 |
| ENSG00000056097 | ZFR | ENSG00000158715 | SLC45A3 |
| ENSG00000227057 | WDR46 | ENSG00000172062 | SMN1 |
| ENSG00000167670 | CHAF1A | ENSG00000205571 | SMN2 |
| ENSG00000127191 | TRAF2 | ENSG00000113141 | IK |
| ENSG00000072506 | HSD17B10 | ENSG00000186105 | LRRC70 |
| ENSG00000215021 | PHB2 | ENSG00000157895 | C12orf43 |
| ENSG00000175467 | SART1 | ENSG00000166441 | RPL27A |
| ENSG00000121073 | SLC35B1 | ENSG00000106346 | USP42 |
| ENSG00000079459 | FDFT1 | ENSG00000185379 | RAD51D |
| ENSG00000143493 | INTS7 | ENSG00000116667 | C1orf21 |
| ENSG00000141543 | EIF4A3 | ENSG00000176444 | CLK2 |
| ENSG00000174197 | MGA | ENSG00000105472 | CLEC11A |
| ENSG00000131269 | ABCB7 | ENSG00000065613 | SLK |
| ENSG00000089009 | RPL6 | ENSG00000005156 | LIG3 |
| ENSG00000197780 | TAF13 | ENSG00000125459 | MSTO1 |
| ENSG00000036549 | ZZZ3 | ENSG00000139146 | FAM60A |
| ENSG00000066135 | KDM4A | ENSG00000060069 | CTDP1 |
| ENSG00000176473 | WDR25 | ENSG00000130935 | NOL11 |
| ENSG00000124614 | RPS10 | ENSG00000115677 | HDLBP |
| ENSG00000107581 | EIF3A | ENSG00000105254 | TBCB |
| ENSG00000084463 | WBP11 | ENSG00000075539 | FRYL |
| ENSG00000137656 | BUD13 | ENSG00000196747 | HIST1H2AI |
| ENSG00000183751 | TBL3 | ENSG00000181513 | ACBD4 |
| ENSG00000119537 | KDSR | ENSG00000153107 | ANAPC1 |
| ENSG00000204220 | PFDN6 | ENSG00000160211 | G6PD |
| ENSG00000170291 | ELP5 | ENSG00000111481 | COPZ1 |
| ENSG00000198563 | DDX39B | ENSG00000070761 | C16orf80 |
| ENSG00000077549 | CAPZB | ENSG00000168924 | LETM1 |
| ENSG00000255529 | POLR2M | ENSG00000105058 | FAM32A |
| ENSG00000100034 | PPM1F | ENSG00000204569 | PPP1R10 |
| ENSG00000196367 | TRRAP | ENSG00000153914 | SREK1 |
| ENSG00000167258 | CDK12 | ENSG00000161509 | GRIN2C |
| ENSG00000039123 | SKIV2L2 | ENSG00000162702 | ZNF281 |
| ENSG00000076043 | REXO2 | ENSG00000004939 | SLC4A1 |
| ENSG00000213676 | ATF6B | ENSG00000139620 | KANSL2 |
| ENSG00000058453 | CROCC | ENSG00000025293 | PHF20 |
| ENSG00000153575 | TUBGCP5 | ENSG00000158545 | ZC3H18 |
| ENSG00000110700 | RPS13 | ENSG00000142546 | NOSIP |
| ENSG00000101181 | MTG2 | ENSG00000143398 | PIP5K1A |
| ENSG00000071539 | TRIP13 | ENSG00000197958 | RPL12 |
| ENSG00000075702 | WDR62 | ENSG00000067225 | PKM |
| ENSG00000171453 | POLR1C | ENSG00000172534 | HCFC1 |
| ENSG00000090989 | EXOC1 | ENSG00000155438 | MKI67IP |
| ENSG00000037897 | METTL1 | ENSG00000166582 | CENPV |
| ENSG00000095139 | ARCN1 | ENSG00000145912 | NHP2 |
| ENSG00000078142 | PIK3C3 | ENSG00000180992 | MRPL14 |
| ENSG00000141030 | COPS3 | ENSG00000118705 | RPN2 |
| ENSG00000126249 | PDCD2L | ENSG00000163161 | ERCC3 |
| ENSG00000117408 | IPO13 | ENSG00000136819 | C9orf78 |
| ENSG00000130725 | UBE2M | ENSG00000124787 | RPP40 |
| ENSG00000175054 | ATR | ENSG00000179104 | TMTC2 |
| ENSG00000149016 | TUT1 | ENSG00000140694 | PARN |
| ENSG00000165060 | FXN | ENSG00000143751 | SDE2 |
| ENSG00000117597 | DIEXF | ENSG00000136997 | MYC |
| ENSG00000185085 | INTS5 | ENSG00000147274 | RBMX |
| ENSG00000113595 | TRIM23 | ENSG00000084693 | AGBL5 |
| ENSG00000040633 | PHF23 | ENSG00000165271 | NOL6 |
| ENSG00000178952 | TUFM | ENSG00000221838 | AP4M1 |
| ENSG00000120539 | MASTL | ENSG00000171444 | MCC |
| ENSG00000103549 | RNF40 | ENSG00000101882 | NKAP |
| ENSG00000119723 | COQ6 | ENSG00000186847 | KRT14 |
| ENSG00000171311 | EXOSC1 | ENSG00000014824 | SLC30A9 |
| ENSG00000106245 | BUD31 | ENSG00000166685 | COG1 |
| ENSG00000118046 | STK11 | ENSG00000108349 | CASC3 |
| ENSG00000125484 | GTF3C4 | ENSG00000175216 | CKAP5 |
| ENSG00000089094 | KDM2B | ENSG00000259494 | MRPL46 |
| ENSG00000121621 | KIF18A | ENSG00000028310 | BRD9 |
| ENSG00000129911 | KLF16 | ENSG00000136450 | SRSF1 |
| ENSG00000102302 | FGD1 | ENSG00000204859 | ZBTB48 |
| ENSG00000135679 | MDM2 | ENSG00000165209 | STRBP |
| ENSG00000185115 | NDNL2 | ENSG00000163466 | ARPC2 |
| ENSG00000140553 | UNC45A | ENSG00000125485 | DDX31 |
| ENSG00000129562 | DAD1 | ENSG00000070778 | PTPN21 |
| ENSG00000100138 | NHP2L1 | ENSG00000126001 | CEP250 |
| ENSG00000111641 | NOP2 | ENSG00000169249 | ZRSR2 |
| ENSG00000173660 | UQCRH | ENSG00000111011 | RSRC2 |
| ENSG00000198677 | TTC37 | ENSG00000139496 | NUPL1 |
| ENSG00000135503 | ACVR1B | ENSG00000131746 | TNS4 |
| ENSG00000180998 | GPR137C | ENSG00000061936 | SFSWAP |
| ENSG00000153187 | HNRNPU | ENSG00000196584 | XRCC2 |
| ENSG00000106459 | NRF1 | ENSG00000168286 | THAP11 |
| ENSG00000156261 | CCT8 | ENSG00000119787 | ATL2 |
| ENSG00000118363 | SPCS2 | ENSG00000182446 | NPLOC4 |
| ENSG00000164134 | NAA15 | ENSG00000071462 | WBSCR22 |
| ENSG00000060642 | PIGV | ENSG00000213397 | HAUS7 |
| ENSG00000090889 | KIF4A | ENSG00000178028 | DMAP1 |
| ENSG00000101361 | NOP56 | ENSG00000067596 | DHX8 |
| ENSG00000167792 | NDUFV1 | ENSG00000198015 | MRPL42 |
| ENSG00000184162 | NR2C2AP | ENSG00000133706 | LARS |
| ENSG00000128524 | ATP6V1F | ENSG00000149635 | OCSTAMP |
| ENSG00000100387 | RBX1 | ENSG00000117505 | DR1 |
| ENSG00000110906 | KCTD10 | ENSG00000155868 | MED7 |
| ENSG00000147457 | CHMP7 | ENSG00000129197 | RPAIN |
| ENSG00000124570 | SERPINB6 | ENSG00000065978 | YBX1 |
| ENSG00000186468 | RPS23 | ENSG00000260238 | PMF1-BGLAP |
| ENSG00000136122 | BORA | ENSG00000178988 | MRFAP1L1 |
| ENSG00000047249 | ATP6V1H | ENSG00000168005 | C11orf84 |
| ENSG00000127804 | METTL16 | ENSG00000162408 | NOL9 |
| ENSG00000104412 | EMC2 | ENSG00000140350 | ANP32A |
| ENSG00000173726 | TOMM20 | ENSG00000261796 | ISY1-RAB43 |
| ENSG00000138777 | PPA2 | ENSG00000174405 | LIG4 |
| ENSG00000170043 | TRAPPC1 | ENSG00000197414 | GOLGA6L1 |
| ENSG00000124486 | USP9X | ENSG00000116062 | MSH6 |
| ENSG00000105705 | SUGP1 | ENSG00000116906 | GNPAT |
| ENSG00000223501 | VPS52 | ENSG00000134597 | RBMX2 |
| ENSG00000107815 | C10orf2 | ENSG00000071994 | PDCD2 |
| ENSG00000100109 | TFIP11 | ENSG00000112742 | TTK |
| ENSG00000136271 | DDX56 | ENSG00000106636 | YKT6 |
| ENSG00000146830 | GIGYF1 | ENSG00000101773 | RBBP8 |
| ENSG00000198382 | UVRAG | ENSG00000103061 | SLC7A6OS |
| ENSG00000160285 | LSS | ENSG00000140259 | MFAP1 |
| ENSG00000137770 | CTDSPL2 | ENSG00000197077 | KIAA1671 |
| ENSG00000116670 | MAD2L2 | ENSG00000204435 | CSNK2B |
| ENSG00000165280 | VCP | ENSG00000055130 | CUL1 |
| ENSG00000183963 | SMTN | ENSG00000100209 | HSCB |
| ENSG00000164961 | KIAA0196 | ENSG00000113048 | MRPS27 |
| ENSG00000157216 | SSBP3 | ENSG00000189403 | HMGB1 |
| ENSG00000129932 | DOHH | ENSG00000173011 | TADA2B |
| ENSG00000167721 | TSR1 | ENSG00000169836 | TACR3 |
| ENSG00000188352 | FOCAD | ENSG00000133816 | MICAL2 |
| ENSG00000104853 | CLPTM1 | ENSG00000141452 | C18orf8 |
| ENSG00000185883 | ATP6V0C | ENSG00000006715 | VPS41 |
| ENSG00000100519 | PSMC6 | ENSG00000136518 | ACTL6A |
| ENSG00000110107 | PRPF19 | ENSG00000100297 | MCM5 |
| ENSG00000184203 | PPP1R2 | ENSG00000165898 | ISCA2 |
| ENSG00000148824 | MTG1 | ENSG00000156384 | SFR1 |
| ENSG00000113810 | SMC4 | ENSG00000145414 | NAF1 |
| ENSG00000121152 | NCAPH | ENSG00000101972 | STAG2 |
| ENSG00000241127 | YAE1D1 | ENSG00000112658 | SRF |
| ENSG00000139197 | PEX5 | ENSG00000162736 | NCSTN |
| ENSG00000101464 | PIGU | ENSG00000103266 | STUB1 |
| ENSG00000132676 | DAP3 | ENSG00000008018 | PSMB1 |
| ENSG00000135972 | MRPS9 | ENSG00000149506 | ZP1 |
| ENSG00000089157 | RPLP0 | ENSG00000111530 | CAND1 |
| ENSG00000138035 | PNPT1 | ENSG00000027001 | MIPEP |
| ENSG00000171824 | EXOSC10 | ENSG00000152266 | PTH |
| ENSG00000153179 | RASSF3 | ENSG00000154174 | TOMM70A |
| ENSG00000110713 | NUP98 | ENSG00000164045 | CDC25A |
| ENSG00000100865 | CINP | ENSG00000164758 | MED30 |
| ENSG00000136045 | PWP1 | ENSG00000160401 | C9orf117 |
| ENSG00000167526 | RPL13 | ENSG00000155959 | VBP1 |
| ENSG00000088766 | CRLS1 | ENSG00000105409 | ATP1A3 |
| ENSG00000103510 | KAT8 | ENSG00000175106 | TVP23C |
| ENSG00000143368 | SF3B4 | ENSG00000185950 | IRS2 |
| ENSG00000156697 | UTP14A | ENSG00000149256 | TENM4 |
| ENSG00000176248 | ANAPC2 | ENSG00000116957 | TBCE |
| ENSG00000188786 | MTF1 | ENSG00000154719 | MRPL39 |
| ENSG00000175756 | AURKAIP1 | ENSG00000105364 | MRPL4 |
| ENSG00000140395 | WDR61 | ENSG00000198218 | QRICH1 |
| ENSG00000113368 | LMNB1 | ENSG00000013503 | POLR3B |
| ENSG00000060339 | CCAR1 | ENSG00000126756 | UXT |
| ENSG00000162385 | MAGOH | ENSG00000184988 | TMEM106A |
| ENSG00000105372 | RPS19 | ENSG00000186432 | KPNA4 |
| ENSG00000083312 | TNPO1 | ENSG00000156304 | SCAF4 |
| ENSG00000100142 | POLR2F | ENSG00000090565 | RAB11FIP3 |
| ENSG00000204560 | DHX16 | ENSG00000163508 | EOMES |
| ENSG00000197771 | MCMBP | ENSG00000147003 | TMEM27 |
| ENSG00000099817 | POLR2E | ENSG00000198730 | CTR9 |
| ENSG00000161980 | POLR3K | ENSG00000105321 | CCDC9 |
| ENSG00000117133 | RPF1 | ENSG00000120333 | MRPS14 |
| ENSG00000125901 | MRPS26 | ENSG00000121680 | PEX16 |
| ENSG00000168827 | GFM1 | ENSG00000088205 | DDX18 |
| ENSG00000161513 | FDXR | ENSG00000132432 | SEC61G |
| ENSG00000137818 | RPLP1 | ENSG00000186329 | TMEM212 |
| ENSG00000150990 | DHX37 | ENSG00000094804 | CDC6 |
| ENSG00000061794 | MRPS35 | ENSG00000169084 | DHRSX |
| ENSG00000143155 | TIPRL | ENSG00000107618 | RBP3 |
| ENSG00000253626 | EIF5AL1 | ENSG00000146426 | TIAM2 |
| ENSG00000231500 | RPS18 | ENSG00000198925 | ATG9A |
| ENSG00000188076 | SCGB1C1 | ENSG00000168242 | HIST1H2BI |
| ENSG00000174442 | ZWILCH | ENSG00000254772 | EEF1G |
| ENSG00000242028 | HYPK | ENSG00000090971 | NAT14 |
| ENSG00000124217 | MOCS3 | ENSG00000144381 | HSPD1 |
| ENSG00000134186 | PRPF38B | ENSG00000127774 | EMC6 |
| ENSG00000105849 | TWISTNB | ENSG00000126259 | KIRREL2 |
| ENSG00000137337 | MDC1 | ENSG00000111364 | DDX55 |
| ENSG00000132207 | SLX1A | ENSG00000100749 | VRK1 |
| ENSG00000181625 | SLX1B | ENSG00000159063 | ALG8 |
| ENSG00000110717 | NDUFS8 | ENSG00000163795 | ZNF513 |
| ENSG00000132341 | RAN | ENSG00000068394 | GPKOW |
| ENSG00000014123 | UFL1 | ENSG00000112659 | CUL9 |
| ENSG00000101191 | DIDO1 | ENSG00000187257 | RSBN1L |
| ENSG00000125952 | MAX | ENSG00000172167 | MTBP |
| ENSG00000163714 | U2SURP | ENSG00000176177 | ENTHD1 |
| ENSG00000253710 | ALG11 | ENSG00000166783 | KIAA0430 |
| ENSG00000104356 | POP1 | ENSG00000165006 | UBAP1 |
| ENSG00000130826 | DKC1 | ENSG00000188958 | UTS2B |
| ENSG00000198780 | FAM169A | ENSG00000136247 | ZDHHC4 |
| ENSG00000116688 | MFN2 | ENSG00000196363 | WDR5 |
| ENSG00000166166 | TRMT61A | ENSG00000116661 | FBXO2 |
| ENSG00000214517 | PPME1 | ENSG00000113013 | HSPA9 |
| ENSG00000077235 | GTF3C1 | ENSG00000090061 | CCNK |
| ENSG00000152240 | HAUS1 | ENSG00000051596 | THOC3 |
| ENSG00000063177 | RPL18 | ENSG00000140534 | TICRR |
| ENSG00000087157 | PGS1 | ENSG00000100216 | TOMM22 |
| ENSG00000100567 | PSMA3 | ENSG00000104613 | INTS10 |
| ENSG00000169371 | SNUPN | ENSG00000183474 | GTF2H2C |
| ENSG00000197651 | CCER1 | ENSG00000159128 | IFNGR2 |
| ENSG00000198900 | TOP1 | ENSG00000243725 | TTC4 |
| ENSG00000213551 | DNAJC9 | ENSG00000102898 | NUTF2 |
| ENSG00000152464 | RPP38 | ENSG00000170515 | PA2G4 |
| ENSG00000131467 | PSME3 | ENSG00000117036 | ETV3 |
| ENSG00000223510 | CDRT15 | ENSG00000196262 | PPIA |
| ENSG00000115053 | NCL | ENSG00000153037 | SRP19 |
| ENSG00000163041 | H3F3A | ENSG00000135801 | TAF5L |
| ENSG00000154813 | DPH3 | ENSG00000119414 | PPP6C |
| ENSG00000181873 | IBA57 | ENSG00000141013 | GAS8 |
| ENSG00000185591 | SP1 | ENSG00000113845 | TIMMDC1 |
| ENSG00000115355 | CCDC88A | ENSG00000175826 | CTDNEP1 |
| ENSG00000139350 | NEDD1 | ENSG00000117543 | DPH5 |
| ENSG00000108518 | PFN1 | ENSG00000204779 | FOXD4L5 |
| ENSG00000108264 | TADA2A | ENSG00000112249 | ASCC3 |
| ENSG00000134809 | TIMM10 | ENSG00000152256 | PDK1 |
| ENSG00000124383 | MPHOSPH10 | ENSG00000169217 | CD2BP2 |
| ENSG00000126067 | PSMB2 | ENSG00000166246 | C16orf71 |
| ENSG00000060688 | SNRNP40 | ENSG00000184164 | CRELD2 |
| ENSG00000042429 | MED17 | ENSG00000107960 | OBFC1 |
| ENSG00000196655 | TRAPPC4 | ENSG00000102384 | CENPI |
| ENSG00000107185 | RGP1 | ENSG00000079785 | DDX1 |
| ENSG00000124608 | AARS2 | ENSG00000133858 | ZFC3H1 |
| ENSG00000092098 | RNF31 | ENSG00000184110 | EIF3C |
| ENSG00000143569 | UBAP2L | ENSG00000146700 | SRCRB4D |
| ENSG00000233822 | HIST1H2BN | ENSG00000163380 | LMOD3 |
| ENSG00000171848 | RRM2 | ENSG00000116273 | PHF13 |
| ENSG00000183161 | FANCF | ENSG00000178229 | ZNF543 |
| ENSG00000166197 | NOLC1 | ENSG00000109475 | RPL34 |
| ENSG00000064703 | DDX20 | ENSG00000156469 | MTERFD1 |
| ENSG00000176102 | CSTF3 | ENSG00000155827 | RNF20 |
| ENSG00000106028 | SSBP1 | ENSG00000213741 | RPS29 |
| ENSG00000143315 | PIGM | ENSG00000165792 | METTL17 |
| ENSG00000136152 | COG3 | ENSG00000110844 | PRPF40B |
| ENSG00000134697 | GNL2 | ENSG00000100842 | EFS |
| ENSG00000159217 | IGF2BP1 | ENSG00000087495 | PHACTR3 |
| ENSG00000080608 | KIAA0020 | ENSG00000126261 | UBA2 |
| ENSG00000267368 | UPK3BL | ENSG00000136718 | IMP4 |
| ENSG00000130119 | GNL3L | ENSG00000091640 | SPAG7 |
| ENSG00000178950 | GAK | ENSG00000184886 | PIGW |
| ENSG00000205659 | LIN52 | ENSG00000184313 | MROH7 |
| ENSG00000123297 | TSFM | ENSG00000163481 | RNF25 |
| ENSG00000241370 | RPP21 | ENSG00000137054 | POLR1E |
| ENSG00000129351 | ILF3 | ENSG00000213085 | CCDC19 |
| ENSG00000174446 | SNAPC5 | ENSG00000171858 | RPS21 |
| ENSG00000132382 | MYBBP1A | ENSG00000130822 | PNCK |
| ENSG00000100664 | EIF5 | ENSG00000145216 | FIP1L1 |
| ENSG00000131469 | RPL27 | ENSG00000147130 | ZMYM3 |
| ENSG00000185128 | TBC1D3F | ENSG00000008086 | CDKL5 |
| ENSG00000111231 | GPN3 | ENSG00000165282 | PIGO |
| ENSG00000182774 | RPS17L | ENSG00000038358 | EDC4 |
| ENSG00000184779 | RPS17 | ENSG00000134684 | YARS |
| ENSG00000186871 | ERCC6L | ENSG00000153832 | FBXO36 |
| ENSG00000204568 | MRPS18B | ENSG00000140006 | WDR89 |
| ENSG00000108312 | UBTF | ENSG00000104643 | MTMR9 |
| ENSG00000167965 | MLST8 | ENSG00000151779 | NBAS |
| ENSG00000115241 | PPM1G | ENSG00000077348 | EXOSC5 |
| ENSG00000171103 | TRMT61B | ENSG00000131043 | AAR2 |
| ENSG00000116586 | LAMTOR2 | ENSG00000160193 | WDR4 |
| ENSG00000105793 | GTPBP10 | ENSG00000140691 | ARMC5 |
| ENSG00000100348 | TXN2 | ENSG00000141959 | PFKL |
| ENSG00000172757 | CFL1 | ENSG00000112053 | SLC26A8 |
| ENSG00000163634 | THOC7 | ENSG00000197111 | PCBP2 |
| ENSG00000008324 | SS18L2 | ENSG00000145191 | EIF2B5 |
| ENSG00000152404 | CWF19L2 | ENSG00000140988 | RPS2 |
| ENSG00000020129 | NCDN | ENSG00000181472 | ZBTB2 |

[0271] The gene symbols used in herein (including in Tables 3 and 4) are based on those found in the Human Gene Naming Committee (HGNC) which is searchable on the world-wide web at www.genenames.org. Ensembl IDs are provided for each gene symbol and are searchable world-wide web at www.ensembl.org.

[0272] The genes provided in Tables 3 and 4 are non-limiting examples of essential genes. Although additional essential genes will be apparent to the skilled artisan based on the knowledge in the art, the suitability of a particular gene for use according to the present disclosure can be determined, e.g., as discussed herein. For example, in some embodiments, a particular essential gene can be selected by analysis of potential off-target sites elsewhere in the genome. In some embodiments, only essential genes with one or more gRNA target sites that are unique in the human genome are selected for methods described herein. In some embodiments, only essential genes with one or more gRNA target sites that are found in only one other locus in the human genome are selected for methods described herein. In some embodiments, only essential genes with one or more gRNA target sites found in only two other loci in the human genome are selected for methods described herein.

### Gene Product of Interest

[0273] The methods, systems and cells of the present disclosure enable the integration of a gene of interest at an essential gene of a cell. The gene of interest can encode any gene product of interest. In certain embodiments, a gene product of interest comprises an antibody, an antigen, an enzyme, a growth factor, a receptor (e.g., cell surface, cytoplasmic, or nuclear), a hormone, a lymphokine, a cytokine, a chemokine, a reporter, a functional fragment of any of the above, or a combination of any of the above.

[0274] In some embodiments, sequence for a gene product of interest can include, but is not limited to, prokaryotic sequences, cDNA from eukaryotic mRNA, genomic DNA sequences from eukaryotic (e.g., mammalian) DNA, and synthetic DNA sequences. For example, a gene of interest may encode an miRNA, an shRNA, a native polypeptide (i.e., a polypeptide found in nature) or fragment thereof; a variant polypeptide (i.e., a mutant of the native polypeptide having less than 100% sequence identity with the native polypeptide) or fragment thereof; an engineered polypeptide or peptide fragment, a therapeutic peptide or polypeptide, an imaging marker, a selectable marker, a degradation signal, and the like.

[0275] In some embodiments, an exemplary gene product of interest is one that confers therapeutic value, e.g., a new therapeutic activity to the cell. In some embodiments, exemplary gene products of interest are polypeptides such as a chimeric antigen receptor (CAR) or antigen-binding fragment thereof, a T cell receptor or antigen binding fragment thereof, a non-naturally occurring variant of FcγRIII (CD16), interleukin 15 (IL-15), interleukin 15 receptor (IL-15R) or a variant thereof, interleukin 12 (IL-12), interleukin-12 receptor (IL-12R) or a variant thereof, human leukocyte antigen G (HLA-G), human leukocyte antigen E (HLA-E), leukocyte surface antigen cluster of differentiation CD47 (CD47), or any combination of two or more thereof. It is to be understood that the methods and cells of the present disclosure are not limited to any particular gene product of interest and that the selection of a gene product of interest will depend on the type of cell and ultimate use of the cells.

[0276] In some embodiments, a gene product of interest may be a cytokine. In some embodiments, expression of a cytokine from a modified cell generated using a method as described herein allows for localized dosing of the cytokine in vivo (e.g., within a subject in need thereof) and/or avoids a need to systemically administer a high-dose of the cytokine to a subject in need thereof (e.g., a lower dose of the cytokine may be administered). In some embodiments, the risk of dose-limiting toxicities associated with administering a cytokine is reduced while cytokine mediated cell functions are maintained. In some embodiments, to facilitate cell function without the need to additionally administer high-doses of soluble cytokines, a partial or full peptide of one or more of IL2, IL4, IL6, IL7, IL9, IL10, IL11, IL12, IL15, IL18, IL21, IFN-α, IFN—B and/or their respective receptor is introduced to the cell to enable cytokine signaling with or without the expression of the cytokine itself, thereby maintaining or improving cell growth, proliferation, expansion, and/or effector function with reduced risk of cytokine toxicities. In some embodiments, the introduced cytokine and/or its respective native or modified receptor for cytokine signaling are expressed on the cell surface. In some embodiments, the cytokine signaling is constitutively activated. In some embodiments, the activation of the cytokine signaling is inducible. In some embodiments, the activation of the cytokine signaling is transient and/or temporal. In some embodiments, a gene product if interest can be IL2, IL3, IL4, IL6, IL7, IL9, IL10, IL11, IL12, IL13, IL15, IL21, GM-CSF, IFN-α, IFN-b, IFN-g, erythropoietin, and/or the respective cytokine receptor. In some embodiments, a gene product of interest can be CCL3, TNFα, CCL23, IL2RB, IL12RB2, or IRF7.

[0277] In some embodiments, a gene product of interest can be a chemokine and/or the respective chemokine receptor. In some embodiments, a chemokine receptor can be, but is not limited to, CCR2, CCR5. CCR8, CX3C1. CX3CR1, CXCR1, CXCR2, CXCR3A, CXCR3B, or CXCR2. In some embodiments, a chemokine can be, but is not limited to, CCL7, CCL19, or CXL14.

[0278] As used herein, the term “chimeric antigen receptor” or “CAR” refers to a receptor protein that has been modified to give cells expressing the CAR the new ability to target a specific protein. Within the context of the disclosure, a cell modified to comprise a CAR or an antigen binding fragment may be used for immunotherapy to target and destroy cells associated with a disease or disorder, e.g., cancer cells. In some embodiments, the CAR can bind to any antigen of interest.

[0279] CARs of interest can include, but are not limited to, a CAR targeting mesothelin, EGFR, HER2 and/or MICA/B. To date, mesothelin-targeted CAR T-cell therapy has shown early evidence of efficacy in a phase I clinical trial of subjects having mesothelioma, non-small cell lung cancer, and breast cancer (NCT02414269). Similarly. CARs targeting EGFR, HER2 and MICA/B have shown promise in early studies (scc, e.g., Li et al. (2018), Cell Death & Disease, 9 (177); Han et al. (2018) Am. J. Cancer Res., 8 (1): 106-119; and Demoulin 2017) Future Oncology, 13 (8); the entire contents of each of which are expressly incorporated herein by reference in their entireties).

[0280] CARs are well-known to those of ordinary skill in the art and include those described in, for example: WO13/063419 (mesothelin), WO15/164594 (EGFR), WO13/063419 (HER2), WO16/154585 (MICA and MICB), the entire contents of each of which are expressly incorporated herein by reference in their entireties. In some embodiments, a gene product of interest is any suitable CAR, NK cell specific CAR (NK-CAR), T cell specific CAR, or other binder that targets a cell, e.g., an NK cell, to a target cell, e.g., a cell associated with a disease or disorder, may be expressed in the modified cells provided herein. Exemplary CARs, and binders, include, but are not limited to, bi-specific antigen binding CARs, switchable CARs, dimerizable CARs, split CARs, multi-chain CARs, inducible CARs, CARs and binders that bind BCMA, androgen receptor, PSMA, PSCA, Muc1, HPV viral peptides (i.e., E7), EBV viral peptides. WT1, CEA. EGFR, EGFRVIII, IL13Ra2, GD2, CA125, EpCAM, Muc16, carbonic anhydrase IX (CAIX), CCR1, CCR4, carcinoembryonic antigen (CEA), CD3, CD5, CD7, CD10, CD19, CD20, CD22, CD23, CD24, CD26, CD30, CD33, CD34, CD35, CD38 CD41, CD44. CD44V6, CD49f, CD56, CD70, CD92, CD99, CD123, CD133. CD135, CD148, CD150. CD261, CD362, CLEC12A. MDM2, CYP1B, livin, cyclin 1. NKp30, NKp46, DNAM1, NKp44, CA9. PD1, PDL1, an antigen of cytomegalovirus (CMV), epithelial glycoprotein-40 (EGP-40), GPRC5D, receptor tyrosine kinases erb-B2,3,4, EGFIR, ERBB folate binding protein (FBP), fetal acetylcholine receptor (AChR), folate receptor-a, ganglioside G3 (GD3) human Epidermal Growth Factor Receptor 2 (HER-2), human telomerase reverse transcriptase (hTERT), ICAM-1, Integrin B7, Interleukin-13 receptor subunit alpha-2 (IL-13Ra2), K-light chain, kinase insert domain receptor (KDR), Lewis A (CA19.9), Lewis Y (Le Y), L1 cell adhesion molecule (LI-CAM), LILRB2, melanoma antigen family A 1 (MAGE-AI), MICA/B, Mucin 16 (Muc-16), NKCSI, NKG2D ligands, c-Met, cancer-testis antigen NYESO-1, oncofetal antigen (h5T4), PRAME, prostate stem cell antigen (PSCA), PRAME prostate-specific membrane antigen (PSMA), tumor-associated glycoprotein 72 (TAG-72), TIM-3, TRBCI, TRBC2, vascular endothelial growth factor R2 (VEGF-R2), Wilms tumor protein (WT-1), a pathogen antigen, or any suitable combination thereof. Additional suitable CARs and binders for use in the modified cells provided herein will be apparent to those of skill in the art based on the present disclosure and the general knowledge in the art. Such additional suitable CARs include those described in FIG. 3 of Davies and Maher, Adoptive T-cell Immunotherapy of Cancer Using Chimeric Antigen Receptor-Grafted T Cells, Archivum Immunologiae et Therapiae Experimentalis 58 (3): 165-78 (2010), the entire contents of which are incorporated herein by reference. Additional CARs suitable for methods described herein include: CD171-specific CARs (Park et al., Mol Ther (2007) 15 (4): 825-833), EGFRvIII-specific CARs (Morgan et al, Hum Gene Ther (2012) 23 (10): 1043-1053), EGF-R-specific CARs (Kobold et al, J Natl Cancer Inst (2014) 107 (1): 364), carbonic anhydrase K-specific CARs (Lamers et al., Biochem Soc Trans (2016) 44 (3): 951-959), FR-α-specific CARs (Kershaw et al., Clin Cancer Res (2006) 12 (20): 6106-6015), HER2-specific CARs (Ahmed et al., J Clin Oncol (2015) 33 (15) 1688-1696; Nakazawa et al., Mol Ther (2011) 19 (12): 2133-2143; Ahmed et al., Mol Ther (2009) 17 (10): 1779-1787; Luo et al., Cell Res (2016) 26 (7): 850-853; Morgan et al., Mol Ther (2010) 18 (4): 843-85 1; Grada et al., Mol Ther Nucleic Acids (2013) 9 (2): 32), CEA-specific CARs (Katz et al., Clin Cancer Res (2015) 21 (14): 3149-3159), IL13Ra2-specific CARs (Brown et al., Clin Cancer Res (2015) 21 (18): 4062-4072), GD2-specific CARs (Louis et al., Blood (2011) 118 (23): 6050-6056; Caruana et al., Nat Med (2015) 21 (5): 524-529), ErbB2-specific CARs (Wilkie et al., J Clin Immunol (2012) 32 (5): 1059-1070), VEGF-R-specific CARs (Chinnasamy et al., Cancer Res (2016) 22 (2): 436-447), FAP-specific CARs (Wang et al., Cancer Immunol Res (2014) 2 (2): 154-166), MSLN-specific CARs (Moon et al., Clin Cancer Res (2011) 17 (14): 4719-30), CD19-specific CARs (Axicabtagene ciloleucel (Yescarta®) and Tisagenlecleucel (Kymriah®). See also, Li et al., J Hematol and Oncol (2018) 11 (22), reviewing clinical trials of tumor-specific CARs. In some embodiments, a CAR is an anti-EGFR CAR. In some embodiments, a CAR is an anti-CD19 CAR. In some embodiments, a CAR is an anti-BCMA CAR. In some embodiments, a CAR is an anti-CD7 CAR.

[0281] As used herein, the term “CD16” refers to a receptor (FcγRIII) for the Fc portion of immunoglobulin G, and it is involved in the removal of antigen-antibody complexes from the circulation, as well as other antibody-dependent responses. In some embodiments, a CD16 protein is an hCD16 variant. In some embodiments an hCD16 variant is a high affinity F158V variant.

[0282] In some embodiments, a gene product of interest comprises a high affinity non-cleavable CD16 (hnCD16) or a variant thereof. In some embodiments, a high affinity non-cleavable CD16 or a variant thereof comprises at least any one of the followings: (a) F176V and S197P in ectodomain domain of CD16 (see e.g., Jing et al., Identification of an ADAM17 Cleavage Region in Human CD16 (FcγRIII) and the Engineering of a Non-Cleavable Version of the Receptor in NK Cells; PLOS One, 2015); (b) a full or partial ectodomain originated from CD64; (c) a non-native (or non-CD16) transmembrane domain; (d) a non-native (or non-CD16) intracellular domain; (e) a non-native (or nonCD16) signaling domain; (f) a non-native stimulatory domain; and (g) transmembrane, signaling, and stimulatory domains that are not originated from CD16, and are originated from a same or different polypeptide. In some embodiments, the non-native transmembrane domain is derived from CD3D, CD3E, CD3G, CD3s, CD4, CD5, CD5a, CD5b. CD27, CD2S, CD40. CDS4, CD166, 4-1BB, OX40, ICOS, ICAM-1, CTLA-4, PD-1, LAG-3, 2B4, BTLA, CD16, IL7, IL12, IL15, KIR2DLA, KIR2DS1. NKp30, NKp44, NKp46, NKG2C, NKG2D, or T cell receptor (TCR) polypeptide. In some embodiments, the non-native stimulatory domain is derived from CD27, CD2S, 4-IBB, OX40. ICOS, PD-1, LAG-3, 2B4, BTLA, DAP10, DAP12, CTLA-4, or NKG2D polypeptide. In some other embodiments, the non-native signaling domain is derived from CD3s, 2B4, DAP10, DAP12, DNAM1, CD137 (41BB), IL21, IL7, IL12, IL15. NKp30, NKp44, NKp46, NKG2C, or NKG2D polypeptide. In some particular embodiments of a hnCD16 variant, the non-native transmembrane domain is derived from NKG2D, the non-native stimulatory domain is derived from 2B4, and the non-native signaling domain is derived from CD3s. In some embodiments, a gene product of interest comprises a high affinity cleavable CD16 (hnCD16) or a variant thereof. In some embodiments, a high affinity cleavable CD16 or a variant thereof comprises at least F176V. In some embodiments, a high affinity cleavable CD16 or a variant thereof does not comprise an S197P amino acid substitution.

[0283] As used herein, the term “IL-15/IL15RA” or “Interleukin-15” (IL-15) refers to a cytokine with structural similarity to Interleukin-2 (IL-2). Like IL-2, IL-15 binds to and signals through a complex composed of IL-2/IL-15 receptor beta chain (CD122) and the common gamma chain (gamma-C. CD132). IL-15 is secreted by mononuclear phagocytes (and some other cells) following infection by virus(es). This cytokine induces cell proliferation of natural killer cells. IL-15 Receptor alpha (IL15RA) specifically binds IL-15 with very high affinity, and is capable of binding IL-15 independently of other subunits (see e.g., Mishra et al., Molecular pathways: Interleukin-15 signaling in health and in cancer, Clinical Cancer Research, 2014). It is suggested that this property allows IL-15 to be produced by one cell, endocytosed by another cell, and then presented to a third party cell. IL15RA is reported to enhance cell proliferation and expression of apoptosis inhibitor BCL2L1/BCL2-XL and BCL2. Exemplary sequences of IL-15 are provided in NG_029605.2, and exemplary sequences of IL-15RA are provided in NM_002189.4. In some embodiments, the IL-15R variant is a constitutively active IL-15R variant. In some embodiments, the constitutively active IL-15R variant is a fusion between IL-15R and an IL-15R agonist, e.g., an IL-15 protein or IL-15R-binding fragment thereof. In some embodiments, the IL-15R agonist is IL-15, or an IL-15R-binding variant thereof. Exemplary suitable IL-15R variants include, without limitation, those described, e.g., in Mortier E et al, 2006; The Journal of Biological Chemistry 2006 281:1612-1619; or in Bessard-A et al., Mol Cancer Ther. 2009 September; 8 (9): 2736-45, the entire contents of each of which are incorporated by reference herein. In some embodiments, membrane bound trans-presentation of IL-15 is a more potent activation pathway than soluble IL-15 (see e.g., Imamura et al., Autonomous growth and increased cytotoxicity of natural killer cells expressing membrane-bound interleukin-15, Blood, 2014). In some embodiments, IL-15R expression comprises: IL15 and IL15Ra expression using a self-cleaving peptide; a fusion protein of IL15 andIL15Ra; an IL15/IL15Ra fusion protein with intracellular domain of IL15Ra truncated; a fusion protein of IL15 and membrane bound Sushi domain of IL15Ra; a fusion protein of IL15 and IL15RB; a fusion protein of IL15 and common receptor yC, wherein the common receptor yC is native or modified; and/or a homodimer of IL15RB.

[0284] As used herein, the term “IL-12” refers to interleukin-12, a cytokine that acts on T and natural killer cells. In some embodiments, a genetically engineered stem cell and/or progeny cell comprises a genetic modification that leads to expression of one or more of an interleukin 12 (IL12) pathway agonist, e.g., IL-12, interleukin 12 receptor (IL-12R) or a variant thereof (e.g., a constitutively active variant of IL-12R. e.g., an IL-12R fused to an IL-12R agonist (IL-12RA).

[0285] In some embodiments, the gene product of interest comprises a protein or polypeptide whose expression within a cell, e.g., a cell modified as described herein, enables the cell to inhibit or evade immune rejection after transplant or engraftment into a subject. In some embodiments, the gene product of interest is HLA-E, HLA-G, CTL4, CD47, or an associated ligand.

[0286] In some embodiments, the gene product of interest is a T cell receptor (TCR) or an antigen-binding fragment thereof, e.g., a recombinant TCR. In some embodiments, the recombinant TCR can bind to an antigen of interest, e.g., an antigen selected from, but not limited to, CD279, CD2, CD95, CD152, CD223CD272, TIM3, KIR, A2aR, SIRPa, CD200, CD200R, CD300. LPA5, NY-ESO, PD1, PDL1, or MAGE-A3/A6. In some embodiments, the TCR or antigen-binding fragment thereof can bind to a viral antigen, e.g., an antigen from hepatitis A, hepatitis B, hepatitis C (HCV), human papilloma virus (HPV) (e.g., HPV-16 (such as HPV-16 E6 or HPV-16 E7), HPV-18, HPV-31, HPV-33, or HPV-35), Epstein-Barr virus (EBV), human herpes virus 8 (HHV-8), human T-cell leukemia virus01 (HTLV-1), human T-cell leukemia virus-2 (HTLV-2) or a cytomegalovirus (CMV).

[0287] In some embodiments, the gene product of interest comprises a single-chain variable fragment that can bind to CD47, PD1, CTLA4, CD28, OX40, 4-1BB, and ligands thereof.

[0288] As used herein, the term “HLA-G” refers to the HLA non-classical class I heavy chain paralogues. This class I molecule is a heterodimer consisting of a heavy chain and a light chain (beta-2 microglobulin). The heavy chain is anchored in the membrane. HLA-G is expressed on fetal derived placental cells. HLA-G is a ligand for NK cell inhibitory receptor KIR2DL4, and therefore expression of this HLA by the trophoblast defends it against NK cell-mediated death. See e.g., Favier et al., Tolerogenic Function of Dimeric Forms of HLA-G Recombinant Proteins: A Comparative Study In Vivo PLOS One 2011, the entire contents of which are incorporated herein by reference. An exemplary sequence of HLA-G is set forth as NG_029039.1.

[0289] As used herein, the term “HLA-E” refers to the HLA class I histocompatibility antigen, alpha chain E, also sometimes referred to as MHC class I antigen E. The HLA-E protein in humans is encoded by the HLA-E gene. The human HLA-E is a non-classical MHC class I molecule that is characterized by a limited polymorphism and a lower cell surface expression than its classical paralogues. This class I molecule is a heterodimer consisting of a heavy chain and a light chain (beta-2 microglobulin). The heavy chain is anchored in the membrane. HLA-E binds a restricted subset of peptides derived from the leader peptides of other class I molecules. HLA-E expressing cells escape allogeneic responses and lysis by NK cells. See e.g., Geornalusse-G et al., Nature Biotechnology 2017 35 (8), the entire contents of which are incorporated herein by reference. Exemplary sequences of the HLA-E protein are provided in NM_005516.6.

[0290] As used herein, the term “CD47,” also sometimes referred to as “integrin associated protein” (IAP), refers to a transmembrane protein that in humans is encoded by the CD47 gene. CD47 belongs to the immunoglobulin superfamily, partners with membrane integrins, and also binds the ligands thrombospondin-1 (TSP-1) and signal-regulatory protein alpha (SIRPa). CD47 acts as a signal to macrophages that allows CD47-expressing cells to escape macrophage attack. See, e.g., Deuse-T, et al., Nature Biotechnology 2019 37:252-258, the entire contents of which are incorporated herein by reference.

[0291] In some embodiments, a gene product of interest comprises a chimeric switch receptor (see e.g., WO2018094244A1-TGFBeta Signal Converter; Ankri et al., Human T cells Engineered to express a programmed death 1/28 costimulatory retargeting molecule display enhanced antitumor activity, The Journal of Immunology, Oct. 15, 2013, 191; Roth et al., Pooled knockin targeting for genome engineering of cellular immunotherapies, Cell. 2020 Apr. 30; 181 (3): 728-744.e21; and Boyerinas et al., A Novel TGF-β2/Interleukin Receptor Signal Conversion Platform That Protects CAR/TCR T Cells from TGF-β2-Mediated Immune Suppression and Induces T Cell Supportive Signaling Networks, Blood, 2017). In some embodiments, chimeric switch receptors are engineered cell-surface receptors comprising an extracellular domain from an endogenous cell-surface receptor and a heterologous intracellular signaling domain, such that ligand recognition by the extracellular domain results in activation of a different signaling cascade than that activated by the wild type form of the cell-surface receptor. In some embodiments, a chimeric switch receptor comprises an extracellular domain of an inhibitory cell-surface receptor fused to an intracellular domain that leads to the transmission of an activating signal rather than the inhibitory signal normally transduced by the inhibitory cell-surface receptor. In some embodiments, extracellular domains derived from cell-surface receptors known to inhibit immune effector cell activation can be fused to activating intracellular domains. In such an embodiment, engagement of the corresponding ligand may then activate signaling cascades that increase, rather than inhibit, the activation of the immune effector cell. For example, in some embodiments, a gene product of interest is a PD1-CD28 switch receptor, wherein the extracellular domain of PD1 is fused to the intracellular signaling domain of CD28 (See e.g., Liu et al., Cancer Res 76:6 (2016), 1578-1590 and Moon et al., Molecular Therapy 22 (2014), S201). In some embodiments, encoding gene product of interest is or comprises the extracellular domain of CD200R and the intracellular signaling domain of CD28 (See Oda et al., Blood 130:22 (2017), 2410-2419).

[0292] In some embodiments, a gene product of interest is a reporter gene (e.g., GFP, mCherry, etc.). In some embodiments, a reporter gene is utilized to confirm the suitability of a knock-in cassette's expression capacity. In certain embodiments, a gene product of interest may be a colored or fluorescent protein such as: blue/UV proteins, e.g. TagBFP, mTagBFP2, Azurite, EBFP2, mKalamal, Sirius, Sapphire, T-Sapphire; cyan proteins, e.g. ECFP, Cerulean, SCFP3A, mTurquoise, mTurquoise2, monomeric Midoriishi-Cyan, TagCFP, mTFPI; green proteins, e.g. EGFP, Emerald, Superfolder GFP, Monomeric Azami Green, TagGFP2, mUKG, m Wasabi, Clover, mNeonGreen; yellow proteins, e.g. EYFP, Citrine, Venus, SYFP2, TagYFP; orange proteins, e.g. Monomeric Kusabira-Orange, mKOK, mKO2, mOrange, mOrange2; red proteins, e.g. mRaspberry, mStrawberry, mTangerine, tdTomato, TagRFP, TagRFP-T, mApple, mRuby, mRuby2; far-red proteins, e.g. mPlum, HcRed-Tandem, mKate2, mNeptune, NirFP; near-IR proteins, e.g. TagRFP657, IFP1.4, iRFP; long stokes shift proteins, e.g. mKeima Red, LSS-mKatel, LSS-mKate2, mBeRFP; photoactivatible proteins, e.g. PA-GFP, PAmCherryl, PATagRFP; photoconvertible proteins, e.g. Kaede (green), Kaede (red), KikGR1 (green), KikGR1 (red), PS-CFP2, PS-CFP2, mEos2 (green), mEos2 (red), mEos3.2 (green), mEos3.2 (red), PSmOrange, PSmOrange, photoswitchable proteins, e.g. Dronpa, and combinations thereof.

[0293] In some embodiments, a gene of interest provided herein can optionally include a sequence encoding a destabilizing domain (“a destabilizing sequence”) for temporal and/or spatial control of protein expression. Non-limiting examples of destabilizing sequences include sequences encoding a FK506 sequence, a dihydrofolate reductase (DHFR) sequence, or other exemplary destabilizing sequences.

[0294] In the absence of a stabilizing ligand, a protein sequence operatively linked to a destabilizing sequence is degraded by ubiquitination. In contrast, in the presence of a stabilizing ligand, protein degradation is inhibited, thereby allowing the protein sequence operatively linked to the destabilizing sequence to be actively expressed. As a positive control for stabilization of protein expression, protein expression can be detected by conventional means, including enzymatic, radiographic, colorimetric, fluorescence, or other spectrographic assays; fluorescent activating cell sorting (FACS) assays; immunological assays (e.g., enzyme linked immunosorbent assay (ELISA), radioimmunoassay (RIA), and immunohistochemistry).

[0295] Additional examples of destabilizing sequences are known in the art. In some embodiments, the destabilizing sequence is a FK506- and rapamycin-binding protein (FKBP12) sequence, and the stabilizing ligand is Shield-1 (Shld1) (Banaszynski et al. (2012) Cell 126 (5): 995-1004, which is incorporated in its entirety herein by reference). In some embodiments, a destabilizing sequence is a DHFR sequence, and a stabilizing ligand is trimethoprim (TMP) (Iwamoto et al. (2010) Chem Biol 17:981-988, which is incorporated in its entirety herein by reference). In some embodiments, a destabilizing domain is small molecule-assisted shutoff (SMASh), where a constitutive degron with a protease and its corresponding cleavage site derived from hepatitis C virus are combined. In some embodiments, a destabilizing domain comprises a HaloTag system, dTag system, and/or nanobody (see e.g., Luh et al., Prey for the proteasome: targeted protein degradation—a medicinal chemist's perspective; Angewandte Chemie, 2020).

[0296] In some embodiments, a destabilizing sequence can be used to temporally control a cell modified as described herein.

[0297] In some embodiments, a gene product of interest may be a suicide gene, (see e.g., Zarogoulidis et al., Suicide Gene Therapy for Cancer-Current Strategies; J Genet Syndr Gene Ther. 2013). In some embodiments, a suicide gene can use a gene-directed enzyme prodrug therapy (GDEPT) approach, a dimerization inducing approach, and/or therapeutic monoclonal antibody mediated approach. In some embodiments, a suicide gene is biologically inert, has an adequate bio-availability profile, an adequate bio-distribution profile, and can be characterized by intrinsic acceptable and/or absence of toxicity. In some embodiments, a suicide gene codes for a protein able to convert, at a cellular level, a non-toxic prodrug into a toxic product. In some embodiments, a suicide gene may improve the safety profile of a cell described herein (see e.g., Greco et al., Improving the safety of cell therapy with the TK-suicide gene; Front Pharmacology. 2015; Jones et al., Improving the safety of cell therapy products by suicide gene transfer; Frontiers Pharmacology, 2014). In some embodiments, a suicide gene is a herpes simplex virus thymidine kinase (HSV-TK). In some embodiments, a suicide gene is a cytosine deaminase (CD). In some embodiments, a suicide gene is an apoptotic gene (e.g., a caspase). In some embodiments, a suicide gene is dimerization inducing, e.g., comprising an inducible FAS (iFAS) or inducible Caspase9 (iCasp9)/AP1903 system. In some embodiments, a suicide gene is a CD20 antigen, and cells expressing such an antigen can be eliminated by clinical-grade anti-CD20 antibody administration. In some embodiments, a suicide gene is a truncated human EGFR polypeptide (huEGFRt) which confers sensitivity to a pharmaceutical-grade anti-EGFR monoclonal antibody, e.g., cetuximab. In some embodiments a suicide gene is a c-myc tag, which confers sensitivity to pharmaceutical-grade anti-cmyc antibodies.

-Exemplary DHFR destabilizing amino acid sequence
SEQ ID NO: 161
MISLIAALAVDYVIGMENAMPWNLPADLAWFKRNTLNKPVIMGRHTWESIGRPLPGRKNIILSS
QPSTDDRVTWVKSVDEAIAACGDVPEIMVIGGGRVIEQFLPKAQKLYLTHIDAEVEGDTHEPDY
EPDDWESVFSEFHDADAQNSHSYCFEILERR
-Exemplary DHFR destabilizing nucleotide sequence
SEQ ID NO: 162
GGTACCATCAGTCTGATTGCGGCGTTAGCGGTAGATTACGTTATCGGCATGGAAAACGCCATGC
CGTGGAACCTGCCTGCCGATCTCGCCTGGTTTAAACGCAACACCTTAAATAAACCCGTGATTAT
GGGCCGCCATACCTGGGAATCAATCGGTCGTCCGTTGCCAGGACGCAAAAATATTATCCTCAGC
AGTCAACCGAGTACGGACGATCGCGTAACGTGGGTGAAGTCGGTGGATGAAGCCATCGCGGCGT
GTGGTGACGTACCAGAAATCATGGTGATTGGCGGCGGTCGCGTTATTGAACAGTTCTTGCCAAA
AGCGCAAAAACTGTATCTGACGCATATCGACGCAGAAGTGGAAGGCGACACCCATTTCCCGGAT
TACGAGCCGGATGACTGGGAATCGGTATTCAGCGAATTCCACGATGCTGATGCGCAGAACTCTC
ACAGCTATTGCTTTGAGATTCTGGAGCGGCGATAA
-Exemplary destabilizing domain
SEQ ID NO: 163
ATCAGTCTGATTGCGGCGTTAGCGGTAGATTACGTTATCGGCATGGAAAACGCCATGCCGTGGA
ACCTGCCTGCCGATCTCGCCTGGTTTAAACGCAACACCTTAAATAAACCCGTGATTATGGGCCG
CCATACCTGGGAATCAATCGGTCGTCCGTTGCCAGGACGCAAAAATATTATCCTCAGCAGTCAA
CCGAGTACGGACGATCGCGTAACGTGGGTGAAGTCGGTGGATGAAGCCATCGCGGCGTGTGGTG
ACGTACCAGAAATCATGGTGATTGGCGGCGGTCGCGTTATTGAACAGTTCTTGCCAAAAGCGCA
AAAACTGTATCTGACGCATATCGACGCAGAAGTGGAAGGCGACACCCATTTCCCGGATTACGAG
CCGGATGACTGGGAATCGGTATTCAGCGAATTCCACGATGCTGATGCGCAGAACTCTCACAGCT
ATTGCTTTGAGATTCTGGAGCGGCGA
-Exemplary FKBP12 destabilizing peptide amino acid sequence
SEQ ID NO: 164
MGVEKQVIRPGNGPKPAPGQTVTVHCTGFGKDGDLSQKFWSTKDEGQKPFSFQIGKGAVIKGWD
EGVIGMQIGEVARLRCSSDYAYGAGGFPAWGIQPNSVLDFEIEVLSVQ

[0298] In some embodiments, a coding sequence for a single gene product of interest may be included in a knock-in cassette. In some embodiments, coding sequences for two gene products of interest may be included in a single knock-in cassette; in some embodiments, this may be referred to as a bicistronic or multicistronic construct. In some embodiments, coding sequences for more than two gene products of interest may be included in a single knock-in cassette; in some embodiments, this may be referred to as a multicistronic construct. In some embodiments, when more than one coding sequence for more than one gene product of interest is included in a knock-in cassette, these sequences may have a linker sequence connecting them. Linker sequences are generally known in the art, an exemplary linker sequence is identified in SEQ ID NO: 164000. In some embodiments, where more than one coding sequence for more than one gene product of interest is included in a knock-in cassette, these sequences may be connected by a linker sequence, an IRES, and/or 2A element.

[0299] In some embodiments, a polynucleotide encoding a gene product of interest comprises or consists of the sequence of any one of SEQ ID NOs: 162-163, 165-182, or 164000. In some embodiments, a polynucleotide encoding a gene product of interest comprises or consists of a sequence that is at least 85%, 90%, 95%, 96%, 97%, 98%, 99%, 99.1%, 99.2%, 99.3%. 99.4%, 99.5%, 99.6%, 99.7%, 99.8%, or 99.9% identical to any one of SEQ ID NOS: 162-163, 165-182, or 164000. In some embodiments, a polynucleotide encoding a gene product of interest comprises or consists of a functional variant of any one of SEQ ID NOs: 162-163, 165-182, or 164000. In some embodiments, a polynucleotide encoding a gene product of interest comprises or consists of a nucleotide sequence having 1, 2, 3, 4, 5, 6, 7, 8, 9, or 10 mutations (e.g., substitutions, insertions, and/or deletions) relative to any one of SEQ ID NOs: 162-163, 165-182, or 164000.

-exemplary linker sequence
SEQ ID NO: 164000
TCTGGCGGAGGAAGCGGAGGCGGAGGATCTGGTGGTGGTGGATCTGGCGGCGGTGGTAGTGGCG
GAGGTTCTCTGCAA
-exemplary CD16 knock-in cassette sequence
SEQ ID NO: 165
ATGTGGCAACTGCTGCTGCCTACAGCTCTGCTGCTTCTGGTGTCTGCCGGCATGAGAACCGAGG
ATCTGCCTAAGGCCGTGGTGTTCCTGGAACCTCAGTGGTACAGAGTGCTGGAAAAGGACAGCGT
GACCCTGAAGTGCCAGGGCGCCTATTCTCCCGAGGACAATAGCACCCAGTGGTTCCACAACGAG
AGCCTGATCAGCAGCCAGGCCAGCAGCTACTTTATCGATGCCGCCACCGTGGACGACAGCGGCG
AGTACAGATGCCAGACCAATCTGAGCACCCTGAGCGACCCTGTGCAGCTGGAAGTGCACATTGG
ATGGTTGCTGCTGCAAGCCCCTAGATGGGTGTTCAAAGAAGAGGACCCCATCCACCTGAGATGC
CACTCTTGGAAGAACACAGCCCTGCACAAAGTGACCTACCTGCAGAACGGCAAGGGCAGAAAGT
ACTTCCACCACAACAGCGACTTCTACATCCCCAAGGCCACACTGAAGGACTCCGGCTCCTACTT
CTGCAGAGGCCTGGTCGGCAGCAAGAACGTGTCCAGCGAGACAGTGAACATCACCATCACACAG
GGCCTCGCCGTGTCTACCATCAGCAGCTTTTTCCCACCTGGCTATCAGGTGTCCTTCTGCCTGG
TCATGGTGCTGCTGTTCGCCGTGGATACCGGCCTGTACTTCAGCGTCAAGACCAACATCCGGTC
CAGCACCAGAGACTGGAAGGACCACAAGTTCAAGTGGCGGAAGGACCCTCAGGACAAGTAA
-exemplary CD16 knock-in cassette sequence
SEQ ID NO: 166
ATGTGGCAGCTGTTGCTGCCGACAGCCCTCCTGTTGCTGGTCTCCGCTGGCATGAGAACCGAGG
ATCTGCCTAAGGCCGTGGTGTTCCTGGAACCTCAGTGGTACAGAGTGCTGGAAAAGGACAGCGT
GACCCTGAAGTGCCAGGGCGCCTATTCTCCCGAGGACAATAGCACCCAGTGGTTCCACAACGAG
AGCCTGATCAGCAGCCAGGCCAGCAGCTACTTTATCGATGCCGCCACCGTGGACGACAGCGGCG
AGTACAGATGCCAGACCAATCTGAGCACCCTGAGCGACCCTGTGCAGCTGGAAGTGCACATTGG
ATGGTTGCTGCTGCAAGCCCCTAGATGGGTGTTCAAAGAAGAGGACCCCATCCACCTGAGATGC
CACTCTTGGAAGAACACAGCCCTGCACAAAGTGACCTACCTGCAGAACGGCAAGGGCAGAAAGT
ACTTCCACCACAACAGCGACTTCTACATCCCCAAGGCCACACTGAAGGACTCCGGCTCCTACTT
CTGCAGAGGCCTGGTCGGCAGCAAGAACGTGTCCAGCGAGACAGTGAACATCACCATCACACAG
GGCCTCGCCGTGTCTACCATCAGCAGCTTTTTCCCACCTGGCTATCAGGTGTCCTTCTGCCTGG
TCATGGTGCTGCTGTTCGCCGTGGATACCGGCCTGTACTTCAGCGTCAAGACCAACATCCGGTC
CAGCACCAGAGACTGGAAGGACCACAAGTTCAAGTGGCGGAAGGACCCTCAGGACAAG
-exemplary CD47 knock-in cassette sequence
SEQ ID NO: 167
ATGTGGCCCCTGGTAGCGGCGCTGTTGCTGGGCTCGGCGTGCTGCGGATCAGCTCAGCTACTAT
TTAATAAAACAAAATCTGTAGAATTCACGTTTTGTAATGACACTGTCGTCATTCCATGCTTTGT
TACTAATATGGAGGCACAAAACACTACTGAAGTATACGTAAAGTGGAAATTTAAAGGAAGAGAT
ATTTACACCTTTGATGGAGCTCTAAACAAGTCCACTGTCCCCACTGACTTTAGTAGTGCAAAAA
TTGAAGTCTCACAATTACTAAAAGGAGATGCCTCTTTGAAGATGGATAAGAGTGATGCTGTCTC
ACACACAGGAAACTACACTTGTGAAGTAACAGAATTAACCAGAGAAGGTGAAACGATCATCGAG
CTAAAATATCGTGTTGTTTCATGGTTTTCTCCAAATGAAAATATTCTTATTGTTATTTTCCCAA
TTTTTGCTATACTCCTGTTCTGGGGACAGTTTGGTATTAAAACACTTAAATATAGATCCGGTGG
TATGGATGAGAAAACAATTGCTTTACTTGTTGCTGGACTAGTGATCACTGTCATTGTCATTGTT
GGAGCCATTCTTTTCGTCCCAGGTGAATATTCATTAAAGAATGCTACTGGCCTTGGTTTAATTG
TGACTTCTACAGGGATATTAATATTACTTCACTACTATGTGTTTAGTACAGCGATTGGATTAAC
CTCCTTCGTCATTGCCATATTGGTTATTCAGGTGATAGCCTATATCCTCGCTGTGGTTGGACTG
AGTCTCTGTATTGCGGCGTGTATACCAATGCATGGCCCTCTTCTGATTTCAGGTTTGAGTATCT
TAGCTCTAGCACAATTACTTGGACTAGTTTATATGAAATTTGTGGCTTCCAATCAGAAGACTAT
ACAACCTCCTAGGAAAGCTGTAGAGGAACCCCTTAATGCATTCAAAGAATCAAAAGGAATGATG
AATGATGAATGA
-exemplary IL15 knock-in cassette sequence
SEQ ID NO: 168
AATTGGGTCAACGTGATCAGCGACCTGAAGAAGATCGAGGACCTGATCCAGAGCATGCACATCG
ACGCCACACTGTACACCGAGTCCGATGTGCACCCTAGCTGCAAAGTGACCGCCATGAAGTGCTT
TCTGCTGGAACTGCAAGTGATCAGCCTGGAAAGCGGCGACGCCAGCATCCACGATACCGTGGAA
AACCTGATCATCCTGGCCAACAACAGCCTGAGCAGCAACGGCAATGTGACCGAGAGCGGCTGCA
AAGAGTGCGAGGAACTGGAAGAGAAGAACATCAAAGAGTTCCTCCAGAGCTTCGTCCACATCGT
GCAGATGTTCATCAACACCAGC
-exemplary IgE-IL15 knock-in cassette sequence
SEQ ID NO: 169
ATGGATTGGACCTGGATCCTGTTTCTGGTGGCCGCTGCCACAAGAGTGCACAGCAATTGGGTCA
ACGTGATCAGCGACCTGAAGAAGATCGAGGACCTGATCCAGAGCATGCACATCGACGCCACACT
GTACACCGAGTCCGATGTGCACCCTAGCTGCAAAGTGACCGCCATGAAGTGCTTTCTGCTGGAA
CTGCAAGTGATCAGCCTGGAAAGCGGCGACGCCAGCATCCACGATACCGTGGAAAACCTGATCA
TCCTGGCCAACAACAGCCTGAGCAGCAACGGCAATGTGACCGAGAGCGGCTGCAAAGAGTGCGA
GGAACTGGAAGAGAAGAACATCAAAGAGTTCCTCCAGAGCTTCGTCCACATCGTGCAGATGTTC
ATCAACACCAGC
-exemplary IgE-IL15 pro-peptide cargo sequence
SEQ ID NO: 170
ATGGACTGGACCTGGATTCTGTTCCTGGTCGCGGCTGCAACGCGAGTCCATAGCGGTATCCATG
TTTTTATTCTTGGGTGTTTTTCTGCTGGGCTGCCTAAGACCGAGGCCAACTGGGTAAATGTCAT
CAGTGACCTCAAGAAAATAGAAGACCTTATACAAAGCATGCACATTGATGCTACTCTCTACACT
GAGTCAGATGTACATCCCTCATGCAAAGTGACGGCCATGAAATGTTTCCTCCTCGAACTTCAAG
TCATATCTCTGGAAAGTGGCGACGCGTCCATCCACGACACGGTCGAAAACCTGATAATACTCGC
TAATAATAGTCTCTCTTCAAATGGTAACGTAACCGAGTCAGGTTGCAAAGAGTGCGAAGAGTTG
GAAGAAAAAAACATAAAGGAGTTCCTGCAAAGTTTCGTGCACATTGTGCAGATGTTCATTAATA
CCTCT
-exemplary IL15Rα cargo sequence
SEQ ID NO: 171
ATCACCTGTCCTCCACCTATGAGCGTGGAACACGCCGACATCTGGGTCAAGAGCTACAGCCTGT
ACAGCAGAGAGCGGTACATCTGCAACAGCGGCTTCAAGAGAAAGGCCGGCACAAGCAGCCTGAC
CGAGTGTGTGCTGAACAAGGCCACAAACGTGGCCCACTGGACCACACCTAGCCTGAAGTGCATC
AGAGATCCCGCTCTGGTTCATCAGAGGCCTGCCCCTCCATCTACAGTGACAACAGCTGGCGTGA
CCCCTCAGCCTGAGTCTCTGTCTCCATCTGGAAAAGAGCCTGCCGCCAGCTCTCCCAGCTCTAA
CAATACTGCTGCCACCACAGCCGCTATCGTGCCTGGATCTCAGCTGATGCCTAGCAAGAGCCCT
AGCACCGGCACAACAGAGATCAGCTCTCACGAGAGCAGCCACGGAACACCTTCTCAGACCACCG
CCAAGAATTGGGAGCTGACAGCCTCTGCCTCTCATCAGCCACCTGGCGTGTACCCACAGGGCCA
CTCTGATACAACAGTGGCCATCAGCACCAGCACCGTTCTGCTGTGTGGCCTGTCTGCTGTTAGC
CTGCTGGCCTGCTACCTGAAGTCTAGACAGACACCTCCTCTGGCCAGCGTGGAAATGGAAGCCA
TGGAAGCTCTGCCTGTCACATGGGGCACCAGCAGCAGAGATGAGGACCTCGAGAATTGCAGCCA
CCACCTG
-exemplary mbIL-15 cargo sequence
SEQ ID NO: 172
ATGGATTGGACCTGGATCCTGTTTCTGGTGGCCGCTGCCACAAGAGTGCACAGCAATTGGGTCA
ACGTGATCAGCGACCTGAAGAAGATCGAGGACCTGATCCAGAGCATGCACATCGACGCCACACT
GTACACCGAGTCCGATGTGCACCCTAGCTGCAAAGTGACCGCCATGAAGTGCTTTCTGCTGGAA
CTGCAAGTGATCAGCCTGGAAAGCGGCGACGCCAGCATCCACGATACCGTGGAAAACCTGATCA
TCCTGGCCAACAACAGCCTGAGCAGCAACGGCAATGTGACCGAGAGCGGCTGCAAAGAGTGCGA
GGAACTGGAAGAGAAGAACATCAAAGAGTTCCTCCAGAGCTTCGTCCACATCGTGCAGATGTTC
ATCAACACCAGCTCTGGCGGAGGAAGCGGAGGCGGAGGATCTGGTGGTGGTGGATCTGGCGGCG
GTGGTAGTGGCGGAGGTTCTCTGCAAATCACCTGTCCTCCACCTATGAGCGTGGAACACGCCGA
CATCTGGGTCAAGAGCTACAGCCTGTACAGCAGAGAGCGGTACATCTGCAACAGCGGCTTCAAG
AGAAAGGCCGGCACAAGCAGCCTGACCGAGTGTGTGCTGAACAAGGCCACAAACGTGGCCCACT
GGACCACACCTAGCCTGAAGTGCATCAGAGATCCCGCTCTGGTTCATCAGAGGCCTGCCCCTCC
ATCTACAGTGACAACAGCTGGCGTGACCCCTCAGCCTGAGTCTCTGTCTCCATCTGGAAAAGAG
CCTGCCGCCAGCTCTCCCAGCTCTAACAATACTGCTGCCACCACAGCCGCTATCGTGCCTGGAT
CTCAGCTGATGCCTAGCAAGAGCCCTAGCACCGGCACAACAGAGATCAGCTCTCACGAGAGCAG
CCACGGAACACCTTCTCAGACCACCGCCAAGAATTGGGAGCTGACAGCCTCTGCCTCTCATCAG
CCACCTGGCGTGTACCCACAGGGCCACTCTGATACAACAGTGGCCATCAGCACCAGCACCGTTC
TGCTGTGTGGCCTGTCTGCTGTTAGCCTGCTGGCCTGCTACCTGAAGTCTAGACAGACACCTCC
TCTGGCCAGCGTGGAAATGGAAGCCATGGAAGCTCTGCCTGTCACATGGGGCACCAGCAGCAGA
GATGAGGACCTCGAGAATTGCAGCCACCACCTG
-exemplary mbIL-15 cargo sequence
SEQ ID NO: 173
ATGGACTGGACCTGGATTCTGTTCCTGGTCGCGGCTGCAACGCGAGTCCATAGCGGTATCCATG
TTTTTATTCTTGGGTGTTTTTCTGCTGGGCTGCCTAAGACCGAGGCCAACTGGGTAAATGTCAT
CAGTGACCTCAAGAAAATAGAAGACCTTATACAAAGCATGCACATTGATGCTACTCTCTACACT
GAGTCAGATGTACATCCCTCATGCAAAGTGACGGCCATGAAATGTTTCCTCCTCGAACTTCAAG
TCATATCTCTGGAAAGTGGCGACGCGTCCATCCACGACACGGTCGAAAACCTGATAATACTCGC
TAATAATAGTCTCTCTTCAAATGGTAACGTAACCGAGTCAGGTTGCAAAGAGTGCGAAGAGTTG
GAAGAAAAAAACATAAAGGAGTTCCTGCAAAGTTTCGTGCACATTGTGCAGATGTTCATTAATA
CCTCTAGCGGCGGAGGATCAGGTGGCGGTGGAAGCGGAGGTGGAGGCTCCGGTGGAGGAGGTAG
TGGCGGAGGTTCTCTTCAAATAACTTGTCCTCCACCGATGTCCGTAGAACATGCGGATATTTGG
GTAAAATCCTATAGCTTGTACAGCCGAGAGCGGTATATCTGCAACAGCGGCTTCAAGCGGAAGG
CCGGCACAAGCAGCCTGACCGAGTGCGTGCTGAACAAGGCCACCAACGTGGCCCACTGGACCAC
CCCTAGCCTGAAGTGCATCAGAGATCCCGCCCTGGTGCATCAGCGGCCTGCCCCTCCAAGCACA
GTGACAACAGCTGGCGTGACCCCCCAGCCTGAGAGCCTGAGCCCTTCTGGAAAAGAGCCTGCCG
CCAGCAGCCCCAGCAGCAACAATACTGCCGCCACCACAGCCGCCATCGTGCCTGGATCTCAGCT
GATGCCCAGCAAGAGCCCTAGCACCGGCACCACCGAGATCAGCAGCCACGAGTCTAGCCACGGC
ACCCCATCTCAGACCACCGCCAAGAACTGGGAGCTGACAGCCAGCGCCTCTCACCAGCCTCCAG
GCGTGTACCCTCAGGGCCACAGCGATACCACAGTGGCCATCAGCACCTCCACCGTGCTGCTGTG
TGGACTGAGCGCCGTGTCACTGCTGGCCTGCTACCTGAAGTCCAGACAGACCCCTCCACTGGCC
AGCGTGGAAATGGAAGCCATGGAAGCACTGCCCGTGACCTGGGGCACCAGCTCCAGAGATGAGG
ATCTGGAAAACTGCTCCCACCACCTG
-exemplary multicistronic CD16, mbIL-15 cargo sequence
SEQ ID NO: 174
ATGTGGCAGCTGTTGCTGCCGACAGCCCTCCTGTTGCTGGTCTCCGCTGGCATGAGAACCGAGG
ATCTGCCTAAGGCCGTGGTGTTCCTGGAACCTCAGTGGTACAGAGTGCTGGAAAAGGACAGCGT
GACCCTGAAGTGCCAGGGCGCCTATTCTCCCGAGGACAATAGCACCCAGTGGTTCCACAACGAG
AGCCTGATCAGCAGCCAGGCCAGCAGCTACTTTATCGATGCCGCCACCGTGGACGACAGCGGCG
AGTACAGATGCCAGACCAATCTGAGCACCCTGAGCGACCCTGTGCAGCTGGAAGTGCACATTGG
ATGGTTGCTGCTGCAAGCCCCTAGATGGGTGTTCAAAGAAGAGGACCCCATCCACCTGAGATGC
CACTCTTGGAAGAACACAGCCCTGCACAAAGTGACCTACCTGCAGAACGGCAAGGGCAGAAAGT
ACTTCCACCACAACAGCGACTTCTACATCCCCAAGGCCACACTGAAGGACTCCGGCTCCTACTT
CTGCAGAGGCCTGGTCGGCAGCAAGAACGTGTCCAGCGAGACAGTGAACATCACCATCACACAG
GGCCTCGCCGTGTCTACCATCAGCAGCTTTTTCCCACCTGGCTATCAGGTGTCCTTCTGCCTGG
TCATGGTGCTGCTGTTCGCCGTGGATACCGGCCTGTACTTCAGCGTCAAGACCAACATCCGGTC
CAGCACCAGAGACTGGAAGGACCACAAGTTCAAGTGGCGGAAGGACCCTCAGGACAAGGGAAGC
GGAGCCACAAACTTCTCTCTGCTGAAGCAGGCAGGAGATGTTGAAGAAAACCCTGGACCTATGG
ATTGGACCTGGATCCTGTTTCTGGTGGCCGCTGCCACAAGAGTGCACAGCAATTGGGTCAACGT
GATCAGCGACCTGAAGAAGATCGAGGACCTGATCCAGAGCATGCACATCGACGCCACACTGTAC
ACCGAGTCCGATGTGCACCCTAGCTGCAAAGTGACCGCCATGAAGTGCTTTCTGCTGGAACTGC
AAGTGATCAGCCTGGAAAGCGGCGACGCCAGCATCCACGATACCGTGGAAAACCTGATCATCCT
GGCCAACAACAGCCTGAGCAGCAACGGCAATGTGACCGAGAGCGGCTGCAAAGAGTGCGAGGAA
CTGGAAGAGAAGAACATCAAAGAGTTCCTCCAGAGCTTCGTCCACATCGTGCAGATGTTCATCA
ACACCAGCTCTGGCGGAGGAAGCGGAGGCGGAGGATCTGGTGGTGGTGGATCTGGCGGCGGTGG
TAGTGGCGGAGGTTCTCTGCAAATCACCTGTCCTCCACCTATGAGCGTGGAACACGCCGACATC
TGGGTCAAGAGCTACAGCCTGTACAGCAGAGAGCGGTACATCTGCAACAGCGGCTTCAAGAGAA
AGGCCGGCACAAGCAGCCTGACCGAGTGTGTGCTGAACAAGGCCACAAACGTGGCCCACTGGAC
CACACCTAGCCTGAAGTGCATCAGAGATCCCGCTCTGGTTCATCAGAGGCCTGCCCCTCCATCT
ACAGTGACAACAGCTGGCGTGACCCCTCAGCCTGAGTCTCTGTCTCCATCTGGAAAAGAGCCTG
CCGCCAGCTCTCCCAGCTCTAACAATACTGCTGCCACCACAGCCGCTATCGTGCCTGGATCTCA
GCTGATGCCTAGCAAGAGCCCTAGCACCGGCACAACAGAGATCAGCTCTCACGAGAGCAGCCAC
GGAACACCTTCTCAGACCACCGCCAAGAATTGGGAGCTGACAGCCTCTGCCTCTCATCAGCCAC
CTGGCGTGTACCCACAGGGCCACTCTGATACAACAGTGGCCATCAGCACCAGCACCGTTCTGCT
GTGTGGCCTGTCTGCTGTTAGCCTGCTGGCCTGCTACCTGAAGTCTAGACAGACACCTCCTCTG
GCCAGCGTGGAAATGGAAGCCATGGAAGCTCTGCCTGTCACATGGGGCACCAGCAGCAGAGATG
AGGACCTCGAGAATTGCAGCCACCACCTG
-exemplary CD19 CAR cargo sequence
SEQ ID NO: 175
ATGCTTCTCCTGGTGACAAGCCTTCTGCTCTGTGAGTTACCACACCCAGCATTCCTCCTGATCC
CAGACATCCAGATGACACAGACTACATCCTCCCTGTCTGCCTCTCTGGGAGACAGAGTCACCAT
CAGTTGCAGGGCAAGTCAGGACATTAGTAAATATTTAAATTGGTATCAGCAGAAACCAGATGGA
ACTGTTAAACTCCTGATCTACCATACATCAAGATTACACTCAGGAGTCCCATCAAGGTTCAGTG
GCAGTGGGTCTGGAACAGATTATTCTCTCACCATTAGCAACCTGGAGCAAGAAGATATTGCCAC
TTACTTTTGCCAACAGGGTAATACGCTTCCGTACACGTTCGGAGGGGGGACTAAGTTGGAAATA
ACAGGCTCCACCTCTGGATCCGGCAAGCCCGGATCTGGCGAGGGATCCACCAAGGGCGAGGTGA
AACTGCAGGAGTCAGGACCTGGCCTGGTGGCGCCCTCACAGAGCCTGTCCGTCACATGCACTGT
CTCAGGGGTCTCATTACCCGACTATGGTGTAAGCTGGATTCGCCAGCCTCCACGAAAGGGTCTG
GAGTGGCTGGGAGTAATATGGGGTAGTGAAACCACATACTATAATTCAGCTCTCAAATCCAGAC
TGACCATCATCAAGGACAACTCCAAGAGCCAAGTTTTCTTAAAAATGAACAGTCTGCAAACTGA
TGACACAGCCATTTACTACTGTGCCAAACATTATTACTACGGTGGTAGCTATGCTATGGACTAC
TGGGGTCAAGGAACCTCAGTCACCGTCTCCTCAGCGGCCGCAATTGAAGTTATGTATCCTCCTC
CTTACCTAGACAATGAGAAGAGCAATGGAACCATTATCCATGTGAAAGGGAAACACCTTTGTCC
AAGTCCCCTATTTCCCGGACCTTCTAAGCCCTTTTGGGTGCTGGTGGTGGTTGGGGGAGTCCTG
GCTTGCTATAGCTTGCTAGTAACAGTGGCCTTTATTATTTTCTGGGTGAGGAGTAAGAGGAGCA
GGCTCCTGCACAGTGACTACATGAACATGACTCCCCGCCGCCCCGGGCCCACCCGCAAGCATTA
CCAGCCCTATGCCCCACCACGCGACTTCGCAGCCTATCGCTCCAGAGTGAAGTTCAGCAGGAGC
GCAGACGCCCCCGCGTACCAGCAGGGCCAGAACCAGCTCTATAACGAGCTCAATCTAGGACGAA
GAGAGGAGTACGATGTTTTGGACAAGAGACGTGGCCGGGACCCTGAGATGGGGGGAAAGCCGAG
AAGGAAGAACCCTCAGGAAGGCCTGTACAATGAACTGCAGAAAGATAAGATGGCGGAGGCCTAC
AGTGAGATTGGGATGAAAGGCGAGCGCCGGAGGGGCAAGGGGCACGATGGCCTTTACCAGGGTC
TCAGTACAGCCACCAAGGACACCTACGACGCCCTTCACATGCAGGCCCTGCCCCCTCGCTAA
-exemplary EGFR CAR cargo sequence
SEQ ID NO: 176
ATGGCACTCCCCGTCACCGCCCTTCTCTTGCCCCTCGCCCTGCTGCTGCATGCTGCCAGGCCCA
TGGACGAAGTGCAGCTCGTGGAGTCCGGTGGAGGACTCGTCCAACCGGGCGGATCCCTTCGCTT
GTCCTGCGCCGCATCAGGCTTCAGCTTCACCAACTATGGCGTCCACTGGGTCAGACAGGCCCCC
GGAAAGGGACTGGAATGGGTGTCCGTGATCTGGAGCGGCGGGAACACCGACTACAACACCTCCG
TGAAGGGCCGGTTCACTATTAGCCGCGACAACTCCAAGAACACTCTGTACCTCCAAATGAACTC
CCTGAGGGCCGAAGATACTGCTGTGTACTATTGCGCGAGAGCCCTGACCTACTACGACTACGAG
TTCGCGTACTGGGGCCAGGGGACTCTCGTGACCGTGTCCAGCGGTGGTGGAGGTTCCGGAGGCG
GAGGTTCTGGTGGCGGGGGATCAGAAATCGTGCTGACTCAGTCCCCTGCGACCTTGTCCCTGAG
CCCTGGAGAACGGGCCACCCTGAGCTGTAGAGCCAGCCAGAGCATCGGGACAAATATTCACTGG
TACCAGCAGAAACCCGGACAAGCACCACGGCTGCTGATCTACTACGCCTCCGAGTCGATTTCCG
GAATCCCGGCTCGCTTTTCGGGGTCTGGATCGGGAACGGACTTCACTCTGACCATCTCGTCGCT
GGAACCCGAGGATTTCGCCGTGTACTACTGCCAACAGAACAACAATTGGCCGACCACGTTCGGC
CAGGGCACCAAGCTCGAGATTAAGGGATCACTGGAAGCGGCCGCAACCACAACACCTGCTCCAA
GGCCCCCCACACCCGCTCCAACTATAGCCAGCCAACCATTGAGCCTCAGACCTGAAGCTTGCAG
GCCCGCAGCAGGAGGCGCCGTCCATACGCGAGGCCTGGACTTCGCGTGTGATATTTATATTTGG
GCCCCTTTGGCCGGAACATGTGGGGTGTTGCTTCTCTCCCTTGTGATCACTCTGTATTGTAAGC
GCGGGAGAAAGAAGCTCCTGTACATCTTCAAGCAGCCTTTTATGCGACCTGTGCAAACCACTCA
GGAAGAAGATGGGTGTTCATGCCGCTTCCCCGAGGAGGAAGAAGGAGGGTGTGAACTGAGGGTG
AAATTTTCTAGAAGCGCCGATGCTCCCGCATATCAGCAGGGTCAGAATCAGCTCTACAATGAAT
TGAATCTCGGCAGGCGAGAAGAGTACGATGTTCTGGACAAGAGACGGGGCAGGGATCCCGAGAT
GGGGGGAAAGCCCCGGAGAAAAAATCCTCAGGAGGGGTTGTACAATGAGCTGCAGAAGGACAAG
ATGGCTGAAGCCTATAGCGAGATCGGAATGAAAGGCGAAAGACGCAGAGGCAAGGGGCATGACG
GTCTGTACCAGGGTCTCTCTACAGCCACCAAGGACACTTATGATGCGTTGCATATGCAAGCCTT
GCCACCCCGCTAA
-exemplary GFP cargo sequence
SEQ ID NO: 177
ATGGTGAGCAAGGGCGAGGAGCTGTTCACCGGGGTGGTGCCCATCCTGGTCGAGCTGGACGGCG
ACGTAAACGGCCACAAGTTCAGCGTGTCCGGCGAGGGCGAGGGCGATGCCACCTACGGCAAGCT
GACCCTGAAGTTCATCTGCACCACCGGCAAGCTGCCCGTGCCCTGGCCCACCCTCGTGACCACC
CTGACCTACGGCGTGCAGTGCTTCAGCCGCTACCCCGACCACATGAAGCAGCACGACTTCTTCA
AGTCCGCCATGCCCGAAGGCTACGTCCAGGAGCGCACCATCTTCTTCAAGGACGACGGCAACTA
CAAGACCCGCGCCGAGGTGAAGTTCGAGGGCGACACCCTGGTGAACCGCATCGAGCTGAAGGGC
ATCGACTTCAAGGAGGACGGCAACATCCTGGGGCACAAGCTGGAGTACAACTACAACAGCCACA
ACGTCTATATCATGGCCGACAAGCAGAAGAACGGCATCAAGGTGAACTTCAAGATCCGCCACAA
CATCGAGGACGGCAGCGTGCAGCTCGCCGACCACTACCAGCAGAACACCCCCATCGGCGACGGC
CCCGTGCTGCTGCCCGACAACCACTACCTGAGCACCCAGTCCGCCCTGAGCAAAGACCCCAACG
AGAAGCGCGATCACATGGTCCTGCTGGAGTTCGTGACCGCCGCCGGGATCACTCTCGGCATGGA
CGAGCTGTACAAGTGA
-exemplary CXCR1 cargo sequence
SEQ ID NO: 178
ATGTCAAATATTACAGATCCACAGATGTGGGATTTTGATGATCTAAATTTCACTGGCATGCCAC
CTGCAGATGAAGATTACAGCCCCTGTATGCTAGAAACTGAGACACTCAACAAGTATGTTGTGAT
CATCGCCTATGCCCTAGTGTTCCTGCTGAGCCTGCTGGGAAACTCCCTGGTGATGCTGGTCATC
TTATACAGCAGGGTCGGCCGCTCCGTCACTGATGTCTACCTGCTGAACCTGGCCTTGGCCGACC
TACTCTTTGCCCTGACCTTGCCCATCTGGGCCGCCTCCAAGGTGAATGGCTGGATTTTTGGCAC
ATTCCTGTGCAAGGTGGTCTCACTCCTGAAGGAAGTCAACTTCTACAGTGGCATCCTGCTGTTG
GCCTGCATCAGTGTGGACCGTTACCTGGCCATTGTCCATGCCACACGCACACTGACCCAGAAGC
GTCACTTGGTCAAGTTTGTTTGTCTTGGCTGCTGGGGACTGTCTATGAATCTGTCCCTGCCCTT
CTTCCTTTTCCGCCAGGCTTACCATCCAAACAATTCCAGTCCAGTTTGCTATGAGGTCCTGGGA
AATGACACAGCAAAATGGCGGATGGTGTTGCGGATCCTGCCTCACACCTTTGGCTTCATCGTGC
CGCTGITTGTCATGCTGTTCTGCTATGGATTCACCCTGCGTACACTGTTTAAGGCCCACATGGG
GCAGAAGCACCGAGCCATGAGGGTCATCTTTGCTGTCGTCCTCATCTTCCTGCTTTGCTGGCTG
CCCTACAACCTGGTCCTGCTGGCAGACACCCTCATGAGGACCCAGGTGATCCAGGAGAGCTGTG
AGCGCCGCAACAACATCGGCCGGGCCCTGGATGCCACTGAGATTCTGGGATTTCTCCATAGCTG
CCTCAACCCCATCATCTACGCCTTCATCGGCCAAAATTTTCGCCATGGATTCCTCAAGATCCTG
GCTATGCATGGCCTGGTCAGCAAGGAGTTCTTGGCACGTCATCGTGTTACCTCCTACACTTCTT
CGTCTGTCAATGTCTCTTCCAACCTCTGA
-exemplary CXCR3B cargo sequence
SEQ ID NO: 179
ATGGAGTTGAGGAAGTACGGCCCTGGAAGACTGGCGGGGACAGTTATAGGAGGAGCTGCTCAGA
GTAAATCACAGACTAAATCAGACTCAATCACAAAAGAGTTCCTGCCAGGCCTTTACACAGCCCC
TTCCTCCCCGTTCCCGCCCTCACAGGTGAGTGACCACCAAGTGCTAAATGACGCCGAGGTTGCC
GCCCTCCTGGAGAACTTCAGCTCTTCCTATGACTATGGAGAAAACGAGAGTGACTCGTGCTGTA
CCTCCCCGCCCTGCCCACAGGACTTCAGCCTGAACTTCGACCGGGCCTTCCTGCCAGCCCTCTA
CAGCCTCCTCTTTCTGCTGGGGCTGCTGGGCAACGGCGCGGTGGCAGCCGTGCTGCTGAGCCGG
CGGACAGCCCTGAGCAGCACCGACACCTTCCTGCTCCACCTAGCTGTAGCAGACACGCTGCTGG
TGCTGACACTGCCGCTCTGGGCAGTGGACGCTGCCGTCCAGTGGGTCTTTGGCTCTGGCCTCTG
CAAAGTGGCAGGTGCCCTCTTCAACATCAACTTCTACGCAGGAGCCCTCCTGCTGGCCTGCATC
AGCTTTGACCGCTACCTGAACATAGITCATGCCACCCAGCTCTACCGCCGGGGGCCCCCGGCCC
GCGTGACCCTCACCTGCCTGGCTGTCTGGGGGCTCTGCCTGCTTTTCGCCCTCCCAGACTTCAT
CTTCCTGTCGGCCCACCACGACGAGCGCCTCAACGCCACCCACTGCCAATACAACTTCCCACAG
GTGGGCCGCACGGCTCTGCGGGTGCTGCAGCTGGTGGCTGGCTTTCTGCTGCCCCTGCTGGTCA
TGGCCTACTGCTATGCCCACATCCTGGCCGTGCTGCTGGTTTCCAGGGGCCAGCGGCGCCTGCG
GGCCATGCGGCTGGTGGTGGTGGTCGTGGTGGCCTTTGCCCTCTGCTGGACCCCCTATCACCTG
GTGGTGCTGGTGGACATCCTCATGGACCTGGGCGCTTTGGCCCGCAACTGTGGCCGAGAAAGCA
GGGTAGACGTGGCCAAGTCGGTCACCTCAGGCCTGGGCTACATGCACTGCTGCCTCAACCCGCT
GCTCTATGCCTTTGTAGGGGTCAAGTTCCGGGAGCGGATGTGGATGCTGCTCTTGCGCCTGGGC
TGCCCCAACCAGAGAGGGCTCCAGAGGCAGCCATCGTCTTCCCGCCGGGATTCATCCTGGTCTG
AGACCTCAGAGGCCTCCTACTCGGGCTTGTGA
-exemplary CXCR3A cargo sequence
SEQ ID NO: 180
ATGGTCCTTGAGGTGAGTGACCACCAAGTGCTAAATGACGCCGAGGTTGCCGCCCTCCTGGAGA
ACTTCAGCTCTTCCTATGACTATGGAGAAAACGAGAGTGACTCGTGCTGTACCTCCCCGCCCTG
CCCACAGGACTTCAGCCTGAACTTCGACCGGGCCTTCCTGCCAGCCCTCTACAGCCTCCTCTTT
CTGCTGGGGCTGCTGGGCAACGGCGCGGTGGCAGCCGTGCTGCTGAGCCGGCGGACAGCCCTGA
GCAGCACCGACACCTTCCTGCTCCACCTAGCTGTAGCAGACACGCTGCTGGTGCTGACACTGCC
GCTCTGGGCAGTGGACGCTGCCGTCCAGTGGGTCTTTGGCTCTGGCCTCTGCAAAGTGGCAGGT
GCCCTCTTCAACATCAACTTCTACGCAGGAGCCCTCCTGCTGGCCTGCATCAGCTTTGACCGCT
ACCTGAACATAGTTCATGCCACCCAGCTCTACCGCCGGGGGCCCCCGGCCCGCGTGACCCTCAC
CTGCCTGGCTGTCTGGGGGCTCTGCCTGCTTTTCGCCCTCCCAGACTTCATCTTCCTGTCGGCC
CACCACGACGAGCGCCTCAACGCCACCCACTGCCAATACAACTTCCCACAGGTGGGCCGCACGG
CTCTGCGGGTGCTGCAGCTGGTGGCTGGCTTTCTGCTGCCCCTGCTGGTCATGGCCTACTGCTA
TGCCCACATCCTGGCCGTGCTGCTGGTTTCCAGGGGCCAGCGGCGCCTGCGGGCCATGCGGCTG
GTGGTGGTGGTCGTGGTGGCCTTTGCCCTCTGCTGGACCCCCTATCACCTGGTGGTGCTGGTGG
ACATCCTCATGGACCTGGGCGCTTTGGCCCGCAACTGTGGCCGAGAAAGCAGGGTAGACGTGGC
CAAGTCGGTCACCTCAGGCCTGGGCTACATGCACTGCTGCCTCAACCCGCTGCTCTATGCCTTT
GTAGGGGTCAAGTTCCGGGAGCGGATGTGGATGCTGCTCTTGCGCCTGGGCTGCCCCAACCAGA
GAGGGCTCCAGAGGCAGCCATCGTCTTCCCGCCGGGATTCATCCTGGTCTGAGACCTCAGAGGC
CTCCTACTCGGGCTTGTGA
-exemplary CCR5 cargo sequence
SEQ ID NO: 181
ATGGATTATCAAGTGTCAAGTCCAATCTATGACATCAATTATTATACATCGGAGCCCTGCCAAA
AAATCAATGTGAAGCAAATCGCAGCCCGCCTCCTGCCTCCGCTCTACTCACTGGTGTTCATCTT
TGGTTTTGTGGGCAACATGCTGGTCATCCTCATCCTGATAAACTGCAAAAGGCTGAAGAGCATG
ACTGACATCTACCTGCTCAACCTGGCCATCTCTGACCTGTTTTTCCTTCTTACTGTCCCCTTCT
GGGCTCACTATGCTGCCGCCCAGTGGGACTTTGGAAATACAATGTGTCAACTCTTGACAGGGCT
CTATTTTATAGGCTTCTTCTCTGGAATCTTCTTCATCATCCTCCTGACAATCGATAGGTACCTG
GCTGTCGTCCATGCTGTGTTTGCTTTAAAAGCCAGGACGGTCACCTTTGGGGTGGTGACAAGTG
TGATCACTTGGGTGGTGGCTGTGTTTGCGTCTCTCCCAGGAATCATCTTTACCAGATCTCAAAA
AGAAGGTCTTCATTACACCTGCAGCTCTCATTTTCCATACAGTCAGTATCAATTCTGGAAGAAT
TTCCAGACATTAAAGATAGTCATCTTGGGGCTGGTCCTGCCGCTGCTTGTCATGGTCATCTGCT
ACTCGGGAATCCTAAAAACTCTGCTTCGGTGTCGAAATGAGAAGAAGAGGCACAGGGCTGTGAG
GCTTATCTTCACCATCATGATTGTTTATTTTCTCTTCTGGGCTCCCTACAACATTGTCCTTCTC
CTGAACACCTTCCAGGAATTCTTTGGCCTGAATAATTGCAGTAGCTCTAACAGGTTGGACCAAG
CTATGCAGGTGACAGAGACTCTTGGGATGACGCACTGCTGCATCAACCCCATCATCTATGCCTT
TGTCGGGGAGAAGTTCAGAAACTACCTCTTAGTCTTCTTCCAAAAGCACATTGCCAAACGCTTC
TGCAAATGCTGTTCTATTTTCCAGCAAGAGGCTCCCGAGCGAGCAAGCTCAGTTTACACCCGAT
CCACTGGGGAGCAGGAAATATCTGTGGGCTTGTGA
-exemplary CCR2 cargo sequence
SEQ ID NO: 182
ATGCTGTCCACATCTCGTTCTCGGTTTATCAGAAATACCAACGAGAGCGGTGAAGAAGTCACCA
CCTTTTTTGATTATGATTACGGTGCTCCCTGTCATAAATTTGACGTGAAGCAAATTGGGGCCCA
ACTCCTGCCTCCGCTCTACTCGCTGGTGTTCATCTTTGGTTTTGTGGGCAACATGCTGGTCGTC
CTCATCTTAATAAACTGCAAAAAGCTGAAGTGCTTGACTGACATTTACCTGCTCAACCTGGCCA
TCTCTGATCTGCTTTTTCTTATTACTCTCCCATTGTGGGCTCACTCTGCTGCAAATGAGTGGGT
CTTTGGGAATGCAATGTGCAAATTATTCACAGGGCTGTATCACATCGGTTATTTTGGCGGAATC
TTCTTCATCATCCTCCTGACAATCGATAGATACCTGGCTATTGTCCATGCTGTGTTTGCTTTAA
AAGCCAGGACGGTCACCTTTGGGGTGGTGACAAGTGTGATCACCTGGTTGGTGGCTGTGTTTGC
TTCTGTCCCAGGAATCATCTTTACTAAATGCCAGAAAGAAGATTCTGTTTATGTCTGTGGCCCT
TATTTTCCACGAGGATGGAATAATTTCCACACAATAATGAGGAACATTTTGGGGCTGGTCCTGC
CGCTGCTCATCATGGTCATCTGCTACTCGGGAATCCTGAAAACCCTGCTTCGGTGTCGAAACGA
GAAGAAGAGGCATAGGGCAGTGAGAGTCATCTTCACCATCATGATTGTTTACTTTCTCTTCIGG
ACTCCCTATAATATTGTCATTCTCCTGAACACCTTCCAGGAATTCTTCGGCCTGAGTAACTGTG
AAAGCACCAGTCAACTGGACCAAGCCACGCAGGTGACAGAGACTCTTGGGATGACTCACTGCTG
CATCAATCCCATCATCTATGCCTTCGTTGGGGAGAAGTTCAGAAGCCTTTTTCACATAGCTCTT
GGCTGTAGGATTGCCCCACTCCAAAAACCAGTGTGTGGAGGTCCAGGAGTGAGACCAGGAAAGA
ATGTGAAAGTGACTACACAAGGACTCCTCGATGGTCGTGGAAAAGGAAAGTCAATTGGCAGAGC
CCCTGAAGCCAGTCTTCAGGACAAAGAAGGAGCCTAG

[0300] In some embodiments, a gene product of interest comprises or consists of an amino acid sequence of any one of SEQ ID NOs: 161, 164, or 183-200. In some embodiments, a gene product of interest comprises or consists of an amino acid sequence that is at least 85%, 90%, 95%, 96%, 97%, 98%, 99%, 99.1%, 99.2%, 99.3%, 99.4%, 99.5%, 99.6%, 99.7%, 99.8%, or 99.9% identical to any one of SEQ ID NOs: 161, 164, or 183-200. In some embodiments, a gene product of interest comprises or consists of a functional variant of any one of SEQ ID NOS: 161, 164, or 183-200. In some embodiments, a gene product of interest comprises or consists of an amino acid sequence having 1, 2, 3, 4, 5, 6, 7, 8, 9, or 10 mutations (e.g., substitutions, insertions, and/or deletions) relative to any one of SEQ ID NOs: 161, 164, or 183-200.

-exemplary linker amino acid sequence
SEQ ID NO: 183
SGGGSGGGGSGGGGSGGGGSGGGSLQ
-exemplary CD16 amino acid sequence
SEQ ID NO: 184
MWQLLLPTALLLLVSAGMRTEDLPKAVVFLEPQWYRVLEKDSVTLKCQGAYSPEDNSTQWFHNE
SLISSQASSYFIDAATVDDSGEYRCQTNLSTLSDPVQLEVHIGWLLLQAPRWVFKEEDPIHLRC
HSWKNTALHKVTYLQNGKGRKYFHHNSDFYIPKATLKDSGSYFCRGLVGSKNVSSETVNITITQ
GLAVSTISSFFPPGYQVSFCLVMVLLFAVDTGLYFSVKTNIRSSTRDWKDHKFKWRKDPQDK
SEQ ID NO: 185-exemplary CD47 amino acid sequence
MWPLVAALLLGSACCGSAQLLFNKTKSVEFTFCNDTVVIPCFVTNMEAQNTTEVYVKWKFKGRD
IYTFDGALNKSTVPTDFSSAKIEVSQLLKGDASLKMDKSDAVSHTGNYTCEVTELTREGETIIE
LKYRVVSWFSPNENILIVIFPIFAILLFWGQFGIKTLKYRSGGMDEKTIALLVAGLVITVIVIV
GAILFVPGEYSLKNATGLGLIVISTGILILLHYYVFSTAIGLTSFVIAILVIQVIAYILAVVGL
SLCIAACIPMHGPLLISGLSILALAQLLGLVYMKFVASNQKTIQPPRKAVEEPLNAFKESKGMM
NDE
-exemplary IL15 amino acid sequence
SEQ ID NO: 186
NWVNVISDLKKIEDLIQSMHIDATLYTESDVHPSCKVTAMKCFLLELQVISLESGDASIHDTVE
NLIILANNSLSSNGNVTESGCKECEELEEKNIKEFLQSFVHIVQMFINTS
-exemplary IgE-IL15 amino acid sequence
SEQ ID NO: 187
MDWTWILFLVAAATRVHSNWVNVISDLKKIEDLIQSMHIDATLYTESDVHPSCKVTAMKCFLLE
LQVISLESGDASIHDTVENLIILANNSLSSNGNVTESGCKECEELEEKNIKEFLQSFVHIVQMF
INTS
-exemplary IgE-IL15 pro-peptide amino acid sequence
SEQ ID NO: 188
MDWTWILFLVAAATRVHSGIHVFILGCFSAGLPKTEANWVNVISDLKKIEDLIQSMHIDATLYT
ESDVHPSCKVTAMKCFLLELQVISLESGDASIHDTVENLIILANNSLSSNGNVTESGCKECEEL
EEKNIKEFLQSFVHIVQMFINTS
-exemplary IL15Rα amino acid sequence
SEQ ID NO: 189
ITCPPPMSVEHADIWVKSYSLYSRERYICNSGFKRKAGTSSLTECVLNKATNVAHWTTPSLKCI
RDPALVHQRPAPPSTVTTAGVTPQPESLSPSGKEPAASSPSSNNTAATTAAIVPGSQLMPSKSP
STGTTEISSHESSHGTPSQTTAKNWELTASASHQPPGVYPQGHSDTTVAISTSTVLLCGLSAVS
LLACYLKSRQTPPLASVEMEAMEALPVTWGTSSRDEDLENCSHHL
-exemplary mbIL-15 amino acid sequence
SEQ ID NO: 190
[sequence omitted]
-exemplary mbIL-15 amino acid sequence
SEQ ID NO: 191
MDWTWILFLVAAATRVHSGIHVFILGCFSAGLPKTEANWVNVISDLKKIEDLIQSMHIDATLYT
ESDVHPSCKVTAMKCFLLELQVISLESGDASIHDTVENLIILANNSLSSNGNVTESGCKECEEL
EEKNIKEFLQSFVHIVQMFINTSSGGGSGGGGSGGGGSGGGGSGGGSLQITCPPPMSVEHADIW
VKSYSLYSRERYICNSGFKRKAGTSSLTECVLNKATNVAHWTTPSLKCIRDPALVHQRPAPPST
VTTAGVTPQPESLSPSGKEPAASSPSSNNTAATTAAIVPGSQLMPSKSPSTGTTEISSHESSHG
TPSQTTAKNWELTASASHQPPGVYPQGHSDTTVAISTSTVLLCGLSAVSLLACYLKSRQTPPLA
SVEMEAMEALPVTWGTSSRDEDLENCSHHL
-exemplary multicistronic CD16, mbIL-15 amino acid sequence
SEQ ID NO: 192
MWQLLLPTALLLLVSAGMRTEDLPKAVVFLEPQWYRVLEKDSVTLKCQGAYSPEDNSTQWFHNE
SLISSQASSYFIDAATVDDSGEYRCQTNLSTLSDPVQLEVHIGWLLLQAPRWVFKEEDPIHLRC
HSWKNTALHKVTYLQNGKGRKYFHHNSDFYIPKATLKDSGSYFCRGLVGSKNVSSETVNITITQ
GLAVSTISSFFPPGYQVSFCLVMVLLFAVDIGLYFSVKTNIRSSTRDWKDHKFKWRKDPQDKGS
GATNFSLLKQAGDVEENPGPMDWTWILFLVAAATRVHSNWVNVISDLKKIEDLIQSMHIDATLY
TESDVHPSCKVTAMKCFLLELQVISLESGDASIHDTVENLIILANNSLSSNGNVTESGCKECEE
LEEKNIKEFLQSFVHIVQMFINTSSGGGSGGGGSGGGGSGGGGSGGGSLQITCPPPMSVEHADI
WVKSYSLYSRERYICNSGFKRKAGTSSLTECVLNKATNVAHWTTPSLKCIRDPALVHQRPAPPS
TVTTAGVTPQPESLSPSGKEPAASSPSSNNTAATTAAIVPGSQLMPSKSPSTGTTEISSHESSH
GTPSQTTAKNWELTASASHQPPGVYPQGHSDTTVAISTSTVLLCGLSAVSLLACYLKSRQTPPL
ASVEMEAMEALPVTWGTSSRDEDLENCSHHL
-exemplary CD19 CAR amino acid sequence
SEQ ID NO: 193
MLLLVTSLLLCELPHPAFLLIPDIQMTQTTSSLSASLGDRVTISCRASQDISKYLNWYQQKPDG
TVKLLIYHTSRLHSGVPSRFSGSGSGTDYSLTISNLEQEDIATYFCQQGNTLPYTFGGGTKLEI
TGSTSGSGKPGSGEGSTKGEVKLQESGPGLVAPSQSLSVTCTVSGVSLPDYGVSWIRQPPRKGL
EWLGVIWGSETTYYNSALKSRLTIIKDNSKSQVFLKMNSLQTDDTAIYYCAKHYYYGGSYAMDY
WGQGTSVTVSSAAAIEVMYPPPYLDNEKSNGTIIHVKGKHLCPSPLFPGPSKPFWVLVVVGGVL
ACYSLLVTVAFIIFWVRSKRSRLLHSDYMNMTPRRPGPTRKHYQPYAPPRDFAAYRSRVKFSRS
ADAPAYQQGQNQLYNELNLGRREEYDVLDKRRGRDPEMGGKPRRKNPQEGLYNELQKDKMAEAY
SEIGMKGERRRGKGHDGLYQGLSTATKDTYDALHMQALPPR
-exemplary EGFR CAR amino acid sequence
SEQ ID NO: 194
MALPVTALLLPLALLLHAARPMDEVQLVESGGGLVQPGGSLRLSCAASGFSFTNYGVHWVRQAP
GKGLEWVSVIWSGGNTDYNTSVKGRFTISRDNSKNTLYLQMNSLRAEDTAVYYCARALTYYDYE
FAYWGQGTLVTVSSGGGGSGGGGSGGGGSEIVLTQSPATLSLSPGERATLSCRASQSIGTNIHW
YQQKPGQAPRLLIYYASESISGIPARFSGSGSGTDFTLTISSLEPEDFAVYYCQQNNNWPTTFG
QGTKLEIKGSLEAAATTTPAPRPPTPAPTIASQPLSLRPEACRPAAGGAVHTRGLDFACDIYIW
APLAGTCGVLLLSLVITLYCKRGRKKLLYIFKQPFMRPVQTTQEEDGCSCRFPEEEEGGCELRV
KFSRSADAPAYQQGQNQLYNELNLGRREEYDVLDKRRGRDPEMGGKPRRKNPQEGLYNELQKDK
[sequence omitted]
-exemplary GFP amino acid sequence
SEQ ID NO: 195
MVSKGEELFTGVVPILVELDGDVNGHKFSVSGEGEGDATYGKLTLKFICTTGKLPVPWPTLVTT
LTYGVQCFSRYPDHMKQHDFFKSAMPEGYVQERTIFFKDDGNYKTRAEVKFEGDTLVNRIELKG
IDFKEDGNILGHKLEYNYNSHNVYIMADKQKNGIKVNFKIRHNIEDGSVQLADHYQQNTPIGDG
PVLLPDNHYLSTQSALSKDPNEKRDHMVLLEFVTAAGITLGMDELYK
-exemplary CXCR1 amino acid sequence
SEQ ID NO: 196
MSNITDPQMWDFDDLNFTGMPPADEDYSPCMLETETLNKYVVIIAYALVFLLSLLGNSLVMLVI
LYSRVGRSVTDVYLLNLALADLLFALTLPIWAASKVNGWIFGTFLCKVVSLLKEVNFYSGILLL
ACISVDRYLAIVHATRTLTQKRHLVKFVCLGCWGLSMNLSLPFFLFRQAYHPNNSSPVCYEVLG
NDTAKWRMVLRILPHTFGFIVPLFVMLFCYGFTLRTLFKAHMGQKHRAMRVIFAVVLIFLLCWL
PYNLVLLADTLMRTQVIQESCERRNNIGRALDATEILGFLHSCLNPIIYAFIGQNFRHGELKIL
AMHGLVSKEFLARHRVTSYTSSSVNVSSNL
-exemplary CXCR3B amino acid sequence
SEQ ID NO: 197
MELRKYGPGRLAGTVIGGAAQSKSQTKSDSITKEFLPGLYTAPSSPFPPSQVSDHQVLNDAEVA
ALLENFSSSYDYGENESDSCCTSPPCPQDFSLNFDRAFLPALYSLLFLLGLLGNGAVAAVLLSR
RTALSSTDTFLLHLAVADTLLVLTLPLWAVDAAVQWVFGSGLCKVAGALFNINFYAGALLLACI
SFDRYLNIVHATQLYRRGPPARVTLTCLAVWGLCLLFALPDFIFLSAHHDERLNATHCQYNFPQ
VGRTALRVLQLVAGFLLPLLVMAYCYAHILAVLLVSRGQRRLRAMRLVVVVVVAFALCWTPYHL
VVLVDILMDLGALARNCGRESRVDVAKSVTSGLGYMHCCLNPLLYAFVGVKFRERMWMLLLRLG
CPNQRGLQRQPSSSRRDSSWSETSEASYSGL
-exemplary CXCR3A amino acid sequence
SEQ ID NO: 198
MVLEVSDHQVLNDAEVAALLENFSSSYDYGENESDSCCTSPPCPQDFSLNFDRAFLPALYSLLF
LLGLLGNGAVAAVLLSRRTALSSTDTFLLHLAVADTLLVLTLPLWAVDAAVQWVFGSGLCKVAG
ALFNINFYAGALLLACISFDRYLNIVHATQLYRRGPPARVTLTCLAVWGLCLLFALPDFIFLSA
HHDERLNATHCQYNFPQVGRTALRVLQLVAGFLLPLLVMAYCYAHILAVLLVSRGQRRLRAMRL
VVVVVVAFALCWTPYHLVVLVDILMDLGALARNCGRESRVDVAKSVTSGLGYMHCCLNPLLYAF
VGVKFRERMWMLLLRLGCPNQRGLQRQPSSSRRDSSWSETSEASYSGL
-exemplary CCR5 amino acid sequence
SEQ ID NO: 199
MDYQVSSPIYDINYYTSEPCQKINVKQIAARLLPPLYSLVFIFGFVGNMLVILILINCKRLKSM
TDIYLLNLAISDLFFLLTVPFWAHYAAAQWDFGNTMCQLLIGLYFIGFFSGIFFIILLTIDRYL
AVVHAVFALKARTVTFGVVTSVITWVVAVFASLPGIIFTRSQKEGLHYTCSSHFPYSQYQFWKN
FQTLKIVILGLVLPLLVMVICYSGILKTLLRCRNEKKRHRAVRLIFTIMIVYFLFWAPYNIVLL
LNTFQEFFGLNNCSSSNRLDQAMQVTETLGMTHCCINPIIYAFVGEKFRNYLLVFFQKHIAKRF
CKCCSIFQQEAPERASSVYTRSTGEQEISVGL
-exemplary CCR2 cargo sequence
SEQ ID NO: 200
MLSTSRSRFIRNTNESGEEVTTFFDYDYGAPCHKFDVKQIGAQLLPPLYSLVFIFGFVGNMLVV
LILINCKKLKCLTDIYLLNLAISDLLFLITLPLWAHSAANEWVFGNAMCKLFTGLYHIGYFGGI
FFIILLTIDRYLAIVHAVFALKARTVTFGVVTSVITWLVAVFASVPGIIFTKCQKEDSVYVCGP
YFPRGWNNFHTIMRNILGLVLPLLIMVICYSGILKILLRCRNEKKRHRAVRVIFTIMIVYFLFW
TPYNIVILLNTFQEFFGLSNCESTSQLDQATQVTETLGMTHCCINPIIYAFVGEKFRSLFHIAL
GCRIAPLQKPVCGGPGVRPGKNVKVTTQGLLDGRGKGKSIGRAPEASLQDKEGA

### AAV Capsids

[0301] In some embodiments, the present disclosure provides one or more polynucleotide constructs (e.g., knock-in cassettes) packaged into an AAV capsid (used, e.g., as a reference construct). In some embodiments, an AAV capsid is from or derived from an AAV capsid of an AAV2, 3, 4, 5, 6, 7, 8, 9, or 10 serotype, or one or more hybrids thereof. In some embodiments, an AAV capsid is from an AAV ancestral serotype. In some embodiments, an AAV capsid is an ancestral (Anc) AAV capsid. An Anc capsid is created from a construct sequence that is constructed using evolutionary probabilities and evolutionary modeling to determine a probable ancestral sequence. In some embodiments, an AAV capsid has been modified in a manner known in the art (see e.g., Büning and Srivastava, Capsid modifications for targeting and improving the efficacy of AAV vectors, Mol Ther Methods Clin Dev. 2019)

[0302] In some embodiments, as provided herein, any combination of AAV capsids and AAV constructs (e.g., comprising AAV ITRs) may be used in recombinant AAV (rAAV) particles of the present disclosure. In some embodiments, an AAV ITR is from or derived from an AAV ITR of AAV2, 3, 4, 5, 6, 7, 8, 9, or 10. For example, wild-type or variant AA6 ITRs and AAV6 capsid, wild-type or variant AAV2 ITRs and AAV6 capsid, etc. In some embodiments of the present disclosure, an AAV particle is wholly comprised of AAV6 components (e.g., capsid and ITRs are AAV6 serotype). In some embodiments, an AAV particle is an AAV6/2, AAV6/8 or AAV6/9 particle (e.g., an AAV2, AAV8 or AAV9 capsid with an AAV construct having AAV6 ITRs).

### Exemplary AAV Constructs

[0303] In some embodiments, a donor template is included within an AAV construct (e.g., a reference AAV construct). In some embodiments, an AAV construct sequence comprises or consists of the sequence of any one of SEQ ID NO: 201-204. In some embodiments, an exemplary AAV construct is represented by SEQ ID NO:201. In some embodiments, an exemplary AAV construct is represented by SEQ ID NO: 202. In some embodiments, an exemplary AAV construct is represented by SEQ ID NO: 203. In some embodiments, an exemplary AAV construct is represented by SEQ ID NO: 204. In some embodiments, an exemplary AAV construct is at least 80%, 85%, 90%, 95%, 98%, or 99% identical to a sequence represented by SEQ ID NO: 201-204.

-exemplary AAV construct for donor template insertion at GAPDH locus
SEQ ID NO: 201
CCTGCAGGCAGCTGCGCGCTCGCTCGCTCACTGAGGCCGCCCGGGCAAAGCCCGGGCGTCGGGC
GACCTTTGGTCGCCCGGCCTCAGTGAGCGAGCGAGCGCGCAGAGAGGGAGTGGCCAACTCCATC
ACTAGGGGTTCCTGTCGACGAAGACTGTGGATGGCCCCTCCGGGAAACTGTGGCGTGATGGCCG
CGGGGCTCTCCAGAACATCATCCCTGCCTCTACTGGCGCTGCCAAGGCTGTGGGCAAGGTCATC
CCTGAGCTGAACGGGAAGCTCACTGGCATGGCCTTCCGTGTCCCCACTGCCAACGTGTCAGTGG
TGGACCTGACCTGCCGTCTAGAAAAACCTGCCAAATATGATGACATCAAGAAGGTGGTGAAGCA
GGCGTCGGAGGGCCCCCTCAAGGGCATCCTGGGCTACACTGAGCACCAGGTGGTCTCCTCTGAC
TTCAACAGCGACACCCACTCCTCCACCTTTGACGCTGGGGCTGGCATTGCCCTCAACGACCACT
TTGTCAAGCTCATTTCCTGGTATGTGGCTGGGGCCAGAGACTGGCTCTTAAAAAGTGCAGGGTC
TGGCGCCCTCTGGTGGCTGGCTCAGAAAAAGGGCCCTGACAACTCTTTACATCTTCTAGGTATG
ACAACGAGTTCGGATATAGCAATAGAGTGGTCGATCTGATGGCTCATATGGCTAGCAAAGAGGG
AAGCGGAGCTACTAACTTCAGCCTGCTGAAGCAGGCTGGAGACGTGGAGGAGAACCCIGGACCT
ATGTGGCAACTGCTGCTGCCTACAGCTCTGCTGCTTCTGGTGTCTGCCGGCATGAGAACCGAGG
ATCTGCCTAAGGCCGTGGTGTTCCTGGAACCTCAGTGGTACAGAGTGCTGGAAAAGGACAGCGT
GACCCTGAAGTGCCAGGGCGCCTATTCTCCCGAGGACAATAGCACCCAGTGGTTCCACAACGAG
AGCCTGATCAGCAGCCAGGCCAGCAGCTACTTTATCGATGCCGCCACCGTGGACGACAGCGGCG
AGTACAGATGCCAGACCAATCTGAGCACCCTGAGCGACCCTGTGCAGCTGGAAGTGCACATTGG
ATGGTTGCTGCTGCAAGCCCCTAGATGGGTGTTCAAAGAAGAGGACCCCATCCACCTGAGATGC
CACTCTTGGAAGAACACAGCCCTGCACAAAGTGACCTACCTGCAGAACGGCAAGGGCAGAAAGT
ACTTCCACCACAACAGCGACTTCTACATCCCCAAGGCCACACTGAAGGACTCCGGCTCCTACTT
CTGCAGAGGCCTGGTCGGCAGCAAGAACGTGTCCAGCGAGACAGTGAACATCACCATCACACAG
GGCCTCGCCGTGTCTACCATCAGCAGCTTTTTCCCACCTGGCTATCAGGTGTCCTTCTGCCTGG
TCATGGTGCTGCTGTTCGCCGTGGATACCGGCCTGTACTTCAGCGTCAAGACCAACATCCGGTC
CAGCACCAGAGACTGGAAGGACCACAAGTTCAAGTGGCGGAAGGACCCTCAGGACAAGTAAGCG
GCCGCGTCGAGTCTAGAGGGCCCGTTTAAACCCGCTGATCAGCCTCGACTGTGCCTTCTAGTTG
CCAGCCATCTGTTGTTTGCCCCTCCCCCGTGCCTTCCTTGACCCTGGAAGGTGCCACTCCCACT
GTCCTTTCCTAATAAAATGAGGAAATTGCATCGCATTGTCTGAGTAGGTGTCATTCTATTCTGG
GGGGTGGGGTGGGGCAGGACAGCAAGGGGGAGGATTGGGAAGACAATAGCAGGCATGCTGGGGA
TGCGGTGGGCTCTATGGATTTGGCTACAGCAACAGGGTGGTGGACCTCATGGCCCACATGGCCT
CCAAGGAGTAAGACCCCTGGACCACCAGCCCCAGCAAGAGCACAAGAGGAAGAGAGAGACCCTC
ACTGCTGGGGAGTCCCTGCCACACTCAGTCCCCCACCACACTGAATCTCCCCTCCTCACAGTTG
CCATGTAGACCCCTTGAAGAGGGGAGGGGCCTAGGGAGCCGCACCTTGTCATGTACCATCAATA
AAGTACCCTGTGCTCAACCAGTTACTTGTCCTGTCTTATTCTAGGGTCTGGGGCAGAGGGGAGG
GAAGCTGGGCTTGTGTCAAGGTGAGACATTCTTGCTGGGGAGGGACCTGGTATGTTCTCCTCAG
ACTGAGGGTAGGGCCTCCAAACAGCCTTGCTTGCTTCGAGAACCATTTGCTTCCCGCTCAGACG
TCTTGAGTGCTACAGGAAGCTGGCACCACTACTTCAGAGAACAAGGCCTTTTCCTCTCCTCGCT
CCAGTAGATCTAGGAACCCCTAGTGATGGAGTTGGCCACTCCCTCTCTGCGCGCTCGCTCGCTC
ACTGAGGCCGGGCGACCAAAGGTCGCCCGACGCCCGGGCTTTGCCCGGGCGGCCTCAGTGAGCG
AGCGAGCGCGCAGCTGCCTGCAGG
-exemplary AAV construct for donor template insertion at GAPDH locus
SEQ ID NO: 202
CCTGCAGGCAGCTGCGCGCTCGCTCGCTCACTGAGGCCGCCCGGGCAAAGCCCGGGCGTCGGGC
GACCTTTGGTCGCCCGGCCTCAGTGAGCGAGCGAGCGCGCAGAGAGGGAGTGGCCAACTCCATC
ACTAGGGGTTCCTGTCGACGAAGACTGTGGATGGCCCCTCCGGGAAACTGTGGCGTGATGGCCG
CGGGGCTCTCCAGAACATCATCCCTGCCTCTACTGGCGCTGCCAAGGCTGTGGGCAAGGTCATC
CCTGAGCTGAACGGGAAGCTCACTGGCATGGCCTTCCGTGTCCCCACTGCCAACGTGTCAGTGG
TGGACCTGACCTGCCGTCTAGAAAAACCTGCCAAATATGATGACATCAAGAAGGTGGTGAAGCA
GGCGTCGGAGGGCCCCCTCAAGGGCATCCTGGGCTACACTGAGCACCAGGTGGTCTCCTCTGAC
TTCAACAGCGACACCCACTCCTCCACCTTTGACGCTGGGGCTGGCATTGCCCTCAACGACCACT
TTGTCAAGCTCATTTCCTGGTATGTGGCIGGGGCCAGAGACTGGCTCTTAAAAAGTGCAGGGTC
TGGCGCCCTCTGGTGGCTGGCTCAGAAAAAGGGCCCTGACAACTCITTACATCTTCTAGGTATG
ACAACGAGTTCGGATATAGCAATAGAGTGGTCGATCTGATGGCTCATATGGCTAGCAAAGAGGG
AAGCGGAGCTACTAACTTCAGCCTGCTGAAGCAGGCTGGAGACGTGGAGGAGAACCCTGGACCT
ATGGTGAGCAAGGGCGAGGAGCTGTTCACCGGGGTGGTGCCCATCCTGGTCGAGCTGGACGGCG
ACGTAAACGGCCACAAGTTCAGCGTGTCCGGCGAGGGCGAGGGCGATGCCACCTACGGCAAGCT
GACCCTGAAGTTCATCTGCACCACCGGCAAGCTGCCCGTGCCCTGGCCCACCCTCGTGACCACC
CTGACCTACGGCGTGCAGTGCTTCAGCCGCTACCCCGACCACATGAAGCAGCACGACTTCTTCA
AGTCCGCCATGCCCGAAGGCTACGTCCAGGAGCGCACCATCTTCTTCAAGGACGACGGCAACTA
CAAGACCCGCGCCGAGGTGAAGTTCGAGGGCGACACCCTGGTGAACCGCATCGAGCTGAAGGGC
ATCGACTTCAAGGAGGACGGCAACATCCTGGGGCACAAGCTGGAGTACAACTACAACAGCCACA
ACGTCTATATCATGGCCGACAAGCAGAAGAACGGCATCAAGGTGAACTTCAAGATCCGCCACAA
CATCGAGGACGGCAGCGTGCAGCTCGCCGACCACTACCAGCAGAACACCCCCATCGGCGACGGC
CCCGTGCTGCTGCCCGACAACCACTACCTGAGCACCCAGTCCGCCCTGAGCAAAGACCCCAACG
AGAAGCGCGATCACATGGTCCTGCTGGAGTTCGTGACCGCCGCCGGGATCACTCTCGGCATGGA
CGAGCTGTACAAGTGAGCGGCCGCGTCGAGTCTAGAGGGCCCGTTTAAACCCGCTGATCAGCCT
CGACTGTGCCTTCTAGTTGCCAGCCATCTGTTGTTTGCCCCTCCCCCGTGCCTTCCTTGACCCT
GGAAGGTGCCACTCCCACTGTCCTTTCCTAATAAAATGAGGAAATTGCATCGCATTGTCTGAGT
AGGTGTCATTCTATTCTGGGGGGTGGGGTGGGGCAGGACAGCAAGGGGGAGGATTGGGAAGACA
ATAGCAGGCATGCTGGGGATGCGGTGGGCTCTATGGATTTGGCTACAGCAACAGGGTGGTGGAC
CTCATGGCCCACATGGCCTCCAAGGAGTAAGACCCCTGGACCACCAGCCCCAGCAAGAGCACAA
GAGGAAGAGAGAGACCCTCACTGCTGGGGAGTCCCTGCCACACTCAGTCCCCCACCACACTGAA
TCTCCCCTCCTCACAGTTGCCATGTAGACCCCTTGAAGAGGGGAGGGGCCTAGGGAGCCGCACC
TTGTCATGTACCATCAATAAAGTACCCTGTGCTCAACCAGTTACTTGTCCTGTCTTATTCTAGG
GTCTGGGGCAGAGGGGAGGGAAGCTGGGCTTGTGTCAAGGTGAGACATTCTTGCTGGGGAGGGA
CCTGGTATGTTCTCCTCAGACTGAGGGTAGGGCCTCCAAACAGCCTTGCTTGCTTCGAGAACCA
TTTGCTTCCCGCTCAGACGTCTTGAGTGCTACAGGAAGCTGGCACCACTACTTCAGAGAACAAG
GCCTTTTCCTCTCCTCGCTCCAGTAGATCTAGGAACCCCTAGTGATGGAGTTGGCCACTCCCTC
TCTGCGCGCTCGCTCGCTCACTGAGGCCGGGCGACCAAAGGTCGCCCGACGCCCGGGCTTTGCC
CGGGCGGCCTCAGTGAGCGAGCGAGCGCGCAGCTGCCTGCAGG
-exemplary AAV construct for donor template insertion at GAPDH locus
SEQ ID NO: 203
CCTGCAGGCAGCTGCGCGCTCGCTCGCTCACTGAGGCCGCCCGGGCAAAGCCCGGGCGTCGGGC
GACCTTTGGTCGCCCGGCCTCAGTGAGCGAGCGAGCGCGCAGAGAGGGAGTGGCCAACTCCATC
ACTAGGGGTTCCTGTCGACGAAGACTGTGGATGGCCCCTCCGGGAAACTGTGGCGTGATGGCCG
CGGGGCTCTCCAGAACATCATCCCTGCCTCTACTGGCGCTGCCAAGGCTGTGGGCAAGGTCATC
CCTGAGCTGAACGGGAAGCTCACTGGCATGGCCTTCCGTGTCCCCACTGCCAACGTGTCAGTGG
TGGACCTGACCTGCCGTCTAGAAAAACCTGCCAAATATGATGACATCAAGAAGGTGGTGAAGCA
GGCGTCGGAGGGCCCCCTCAAGGGCATCCTGGGCTACACTGAGCACCAGGTGGTCTCCTCTGAC
TTCAACAGCGACACCCACTCCTCCACCTTTGACGCTGGGGCTGGCATTGCCCTCAACGACCACT
TTGTCAAGCTCATTTCCTGGTATGTGGCTGGGGCCAGAGACTGGCTCTTAAAAAGTGCAGGGTC
TGGCGCCCTCTGGTGGCTGGCTCAGAAAAAGGGCCCTGACAACTCTTTACATCTTCTAGGTATG
ACAACGAGTTCGGATATAGCAATAGAGTGGTCGATCTGATGGCTCATATGGCTAGCAAAGAGGG
AAGCGGAGCTACTAACTTCAGCCTGCTGAAGCAGGCTGGAGACGTGGAGGAGAACCCTGGACCT
ATGCTTCTCCTGGTGACAAGCCTTCTGCTCTGTGAGTTACCACACCCAGCATTCCTCCTGATCC
CAGACATCCAGATGACACAGACTACATCCTCCCTGTCTGCCTCTCTGGGAGACAGAGTCACCAT
CAGTTGCAGGGCAAGTCAGGACATTAGTAAATATTTAAATTGGTATCAGCAGAAACCAGATGGA
ACTGTTAAACTCCTGATCTACCATACATCAAGATTACACTCAGGAGTCCCATCAAGGTTCAGTG
GCAGTGGGTCTGGAACAGATTATTCTCTCACCATTAGCAACCTGGAGCAAGAAGATATTGCCAC
TTACTTTTGCCAACAGGGTAATACGCTTCCGTACACGTTCGGAGGGGGGACTAAGTTGGAAATA
ACAGGCTCCACCTCTGGATCCGGCAAGCCCGGATCTGGCGAGGGATCCACCAAGGGCGAGGTGA
AACTGCAGGAGTCAGGACCTGGCCTGGTGGCGCCCTCACAGAGCCTGTCCGTCACATGCACTGT
CTCAGGGGTCTCATTACCCGACTATGGTGTAAGCTGGATTCGCCAGCCTCCACGAAAGGGTCTG
GAGTGGCTGGGAGTAATATGGGGTAGTGAAACCACATACTATAATTCAGCTCTCAAATCCAGAC
TGACCATCATCAAGGACAACTCCAAGAGCCAAGTTTTCTTAAAAATGAACAGTCTGCAAACTGA
TGACACAGCCATTTACTACTGTGCCAAACATTATTACTACGGTGGTAGCTATGCTATGGACTAC
TGGGGTCAAGGAACCTCAGTCACCGTCTCCTCAGCGGCCGCAATTGAAGTTATGTATCCTCCTC
CTTACCTAGACAATGAGAAGAGCAATGGAACCATTATCCATGTGAAAGGGAAACACCTTTGTCC
AAGTCCCCTATTTCCCGGACCTTCTAAGCCCTTTTGGGTGCTGGTGGTGGTTGGGGGAGTCCTG
GCTTGCTATAGCTTGCTAGTAACAGTGGCCTTTATTATTTTCTGGGTGAGGAGTAAGAGGAGCA
GGCTCCTGCACAGTGACTACATGAACATGACTCCCCGCCGCCCCGGGCCCACCCGCAAGCATTA
CCAGCCCTATGCCCCACCACGCGACTTCGCAGCCTATCGCTCCAGAGTGAAGTTCAGCAGGAGC
GCAGACGCCCCCGCGTACCAGCAGGGCCAGAACCAGCTCTATAACGAGCTCAATCTAGGACGAA
GAGAGGAGTACGATGTTTTGGACAAGAGACGTGGCCGGGACCCTGAGATGGGGGGAAAGCCGAG
AAGGAAGAACCCTCAGGAAGGCCTGTACAATGAACTGCAGAAAGATAAGATGGCGGAGGCCTAC
AGTGAGATTGGGATGAAAGGCGAGCGCCGGAGGGGCAAGGGGCACGATGGCCTTTACCAGGGTC
TCAGTACAGCCACCAAGGACACCTACGACGCCCTTCACATGCAGGCCCTGCCCCCTCGCTAAAG
CGGCCGCGTCGAGTCTAGAGGGCCCGTTTAAACCCGCTGATCAGCCTCGACTGTGCCTTCTAGT
TGCCAGCCATCTGTTGTTTGCCCCTCCCCCGTGCCTTCCTTGACCCTGGAAGGTGCCACTCCCA
CTGTCCTTTCCTAATAAAATGAGGAAATTGCATCGCATTGTCTGAGTAGGTGTCATTCTATTCT
GGGGGGTGGGGTGGGGCAGGACAGCAAGGGGGAGGATTGGGAAGACAATAGCAGGCATGCTGGG
GATGCGGTGGGCTCTATGGATTTGGCTACAGCAACAGGGTGGTGGACCTCATGGCCCACATGGC
CTCCAAGGAGTAAGACCCCTGGACCACCAGCCCCAGCAAGAGCACAAGAGGAAGAGAGAGACCC
TCACTGCTGGGGAGTCCCTGCCACACTCAGTCCCCCACCACACTGAATCTCCCCTCCTCACAGT
TGCCATGTAGACCCCTTGAAGAGGGGAGGGGCCTAGGGAGCCGCACCTTGTCATGTACCATCAA
TAAAGTACCCTGTGCTCAACCAGTTACTTGTCCTGTCTTATTCTAGGGTCTGGGGCAGAGGGGA
GGGAAGCTGGGCTTGTGTCAAGGTGAGACATTCTTGCTGGGGAGGGACCTGGTATGTTCTCCTC
AGACTGAGGGTAGGGCCTCCAAACAGCCTTGCTTGCTTCGAGAACCATTTGCTTCCCGCTCAGA
CGTCTTGAGTGCTACAGGAAGCTGGCACCACTACTTCAGAGAACAAGGCCTTTTCCTCTCCTCG
CTCCAGTAGATCTAGGAACCCCTAGTGATGGAGTTGGCCACTCCCTCTCTGCGCGCTCGCTCGC
TCACTGAGGCCGGGCGACCAAAGGTCGCCCGACGCCCGGGCTTTGCCCGGGCGGCCTCAGTGAG
CGAGCGAGCGCGCAGCTGCCTGCAGG
-exemplary AAV construct for donor template insertion at GAPDH locus
SEQ ID NO: 204
CCTGCAGGCAGCTGCGCGCTCGCTCGCTCACTGAGGCCGCCCGGGCAAAGCCCGGGCGTCGGGC
GACCTTTGGTCGCCCGGCCTCAGTGAGCGAGCGAGCGCGCAGAGAGGGAGTGGCCAACTCCATC
ACTAGGGGTTCCTGTCGACGAAGACTGTGGATGGCCCCTCCGGGAAACTGTGGCGTGATGGCCG
CGGGGCTCTCCAGAACATCATCCCTGCCTCTACTGGCGCTGCCAAGGCTGTGGGCAAGGTCATC
CCTGAGCTGAACGGGAAGCTCACTGGCATGGCCTTCCGTGTCCCCACTGCCAACGTGTCAGTGG
TGGACCTGACCTGCCGTCTAGAAAAACCTGCCAAATATGATGACATCAAGAAGGTGGTGAAGCA
GGCGTCGGAGGGCCCCCTCAAGGGCATCCTGGGCTACACTGAGCACCAGGTGGTCTCCTCTGAC
TTCAACAGCGACACCCACTCCTCCACCTTTGACGCTGGGGCTGGCATTGCCCTCAACGACCACT
TTGTCAAGCTCATTTCCTGGTATGTGGCTGGGGCCAGAGACTGGCTCTTAAAAAGTGCAGGGTC
TGGCGCCCTCTGGTGGCTGGCTCAGAAAAAGGGCCCTGACAACTCTTTACATCTTCTAGGTATG
ACAACGAGTTCGGATATAGCAATAGAGTGGTCGATCTGATGGCTCATATGGCTAGCAAAGAGGG
AAGCGGAGCTACTAACTTCAGCCTGCTGAAGCAGGCTGGAGACGTGGAGGAGAACCCTGGACCT
ATGGCACTCCCCGTCACCGCCCTTCTCTTGCCCCTCGCCCTGCTGCTGCATGCTGCCAGGCCCA
TGGACGAAGTGCAGCTCGTGGAGTCCGGTGGAGGACTCGTCCAACCGGGCGGATCCCTTCGCTT
GTCCTGCGCCGCATCAGGCTTCAGCTTCACCAACTATGGCGTCCACTGGGTCAGACAGGCCCCC
GGAAAGGGACTGGAATGGGTGTCCGTGATCTGGAGCGGCGGGAACACCGACTACAACACCTCCG
TGAAGGGCCGGTTCACTATTAGCCGCGACAACTCCAAGAACACTCTGTACCTCCAAATGAACTC
CCTGAGGGCCGAAGATACTGCTGTGTACTATTGCGCGAGAGCCCTGACCTACTACGACTACGAG
TTCGCGTACTGGGGCCAGGGGACTCTCGTGACCGTGTCCAGCGGTGGTGGAGGTTCCGGAGGCG
GAGGTTCTGGTGGCGGGGGATCAGAAATCGTGCTGACTCAGTCCCCTGCGACCTTGTCCCTGAG
CCCTGGAGAACGGGCCACCCTGAGCTGTAGAGCCAGCCAGAGCATCGGGACAAATATTCACTGG
TACCAGCAGAAACCCGGACAAGCACCACGGCTGCTGATCTACTACGCCTCCGAGTCGATTTCCG
GAATCCCGGCTCGCTTTTCGGGGTCTGGATCGGGAACGGACTTCACTCTGACCATCTCGTCGCT
GGAACCCGAGGATTTCGCCGTGTACTACTGCCAACAGAACAACAATTGGCCGACCACGTTCGGC
CAGGGCACCAAGCTCGAGATTAAGGGATCACTGGAAGCGGCCGCAACCACAACACCTGCTCCAA
GGCCCCCCACACCCGCTCCAACTATAGCCAGCCAACCATTGAGCCTCAGACCTGAAGCTTGCAG
GCCCGCAGCAGGAGGCGCCGTCCATACGCGAGGCCTGGACTTCGCGTGTGATATTTATATTTGG
GCCCCTTTGGCCGGAACATGTGGGGTGTTGCTTCTCTCCCTTGTGATCACTCTGTATTGTAAGC
GCGGGAGAAAGAAGCTCCTGTACATCTTCAAGCAGCCTTTTATGCGACCTGTGCAAACCACTCA
GGAAGAAGATGGGTGTTCATGCCGCTTCCCCGAGGAGGAAGAAGGAGGGTGTGAACTGAGGGTG
AAATTTTCTAGAAGCGCCGATGCTCCCGCATATCAGCAGGGTCAGAATCAGCTCTACAATGAAT
TGAATCTCGGCAGGCGAGAAGAGTACGATGTTCTGGACAAGAGACGGGGCAGGGATCCCGAGAT
GGGGGGAAAGCCCCGGAGAAAAAATCCTCAGGAGGGGTTGTACAATGAGCTGCAGAAGGACAAG
ATGGCTGAAGCCTATAGCGAGATCGGAATGAAAGGCGAAAGACGCAGAGGCAAGGGGCATGACG
GTCTGTACCAGGGTCTCTCTACAGCCACCAAGGACACTTATGATGCGTTGCATATGCAAGCCTT
GCCACCCCGCTAAAGCGGCCGCGTCGAGTCTAGAGGGCCCGTTTAAACCCGCTGATCAGCCTCG
ACTGTGCCTTCTAGTTGCCAGCCATCTGTTGTTTGCCCCTCCCCCGTGCCTTCCTTGACCCTGG
AAGGTGCCACTCCCACTGTCCTTTCCTAATAAAATGAGGAAATTGCATCGCATTGTCTGAGTAG
GTGTCATTCTATTCTGGGGGGTGGGGTGGGGCAGGACAGCAAGGGGGAGGATTGGGAAGACAAT
AGCAGGCATGCTGGGGATGCGGTGGGCTCTATGGATTTGGCTACAGCAACAGGGTGGTGGACCT
CATGGCCCACATGGCCTCCAAGGAGTAAGACCCCTGGACCACCAGCCCCAGCAAGAGCACAAGA
GGAAGAGAGAGACCCTCACTGCTGGGGAGTCCCTGCCACACTCAGTCCCCCACCACACTGAATC
TCCCCTCCTCACAGTTGCCATGTAGACCCCTTGAAGAGGGGAGGGGCCTAGGGAGCCGCACCTT
GTCATGTACCATCAATAAAGTACCCTGTGCTCAACCAGTTACTTGTCCTGTCTTATTCTAGGGT
CTGGGGCAGAGGGGAGGGAAGCTGGGCTTGTGTCAAGGTGAGACATTCTTGCTGGGGAGGGACC
TGGTATGTTCTCCTCAGACTGAGGGTAGGGCCTCCAAACAGCCTTGCTTGCTTCGAGAACCATT
TGCTTCCCGCTCAGACGTCTTGAGTGCTACAGGAAGCTGGCACCACTACTTCAGAGAACAAGGC
CTTTTCCTCTCCTCGCTCCAGTAGATCTAGGAACCCCTAGTGATGGAGTTGGCCACTCCCTCTC
TGCGCGCTCGCTCGCTCACTGAGGCCGGGCGACCAAAGGTCGCCCGACGCCCGGGCTTTGCCCG
GGCGGCCTCAGTGAGCGAGCGAGCGCGCAGCTGCCTGCAGG

### Exemplary Donor Template Sequences

[0304] In some embodiments, a donor template comprises in 5′ to 3′ order, a target sequence 5′ homology arm (which optionally comprises an optimized sequence that is not a wild type sequence), a second regulatory element that enables expression of a cargo sequence as a separate translational product (e.g., an IRES sequence and/or a 2A element), a cargo sequence (e.g., a gene product of interest), optionally a second regulatory element that enables expression of a cargo sequence as a separate translational product (e.g., an IRES sequence and/or a 2A element), optionally a second cargo sequence (e.g., a gene product of interest), optionally a 3′ UTR, a poly adenylation signal (e.g., a BGHpA signal), and a target sequence 3′ homology arm (which optionally comprises an optimized sequence that is not a wild type sequence).

[0305] In some embodiments, a donor template comprises or consists of the sequence of any one of SEQ ID NOs: 38-57 and 205-218. In some embodiments, a donor template comprises or consists of a sequence that is at least 85%, 90%, 95%, 98% or 99% identical to any one of SEQ ID NOs: 38-57 and 205-218.

exemplary donor template for insertion at GAPDH locus
SEQ ID NO: 38
GAAGACTGTGGATGGCCCCTCCGGGAAACTGTGGCGTGATGGCCGCGGGGCTCTCCAGAACATC
ATCCCTGCCTCTACTGGCGCTGCCAAGGCTGTGGGCAAGGTCATCCCTGAGCTGAACGGGAAGC
TCACTGGCATGGCCTTCCGTGTCCCCACTGCCAACGTGTCAGTGGTGGACCTGACCTGCCGTCT
AGAAAAACCTGCCAAATATGATGACATCAAGAAGGTGGTGAAGCAGGCGTCGGAGGGCCCCCTC
AAGGGCATCCTGGGCTACACTGAGCACCAGGTGGTCTCCTCTGACTTCAACAGCGACACCCACT
CCTCCACCTTTGACGCTGGGGCTGGCATTGCCCTCAACGACCACTTTGTCAAGCTCATTTCCTG
GTATGTGGCTGGGGCCAGAGACTGGCTCTTAAAAAGTGCAGGGTCTGGCGCCCTCTGGTGGCTG
GCTCAGAAAAAGGGCCCTGACAACTCTTTACATCTTCTAGGTATGACAACGAGTTCGGATATAG
CAATAGAGTGGTCGATCTGATGGCTCATATGGCTAGCAAAGAGGAGGGCAGAGGAAGTCTTCTA
ACATGCGGTGACGTGGAGGAGAATCCTGGCCCGATGGTGAGCAAGGGCGAGGAGCTGTTCACCG
GGGTGGTGCCCATCCTGGTCGAGCTGGACGGCGACGTAAACGGCCACAAGTTCAGCGTGTCCGG
CGAGGGCGAGGGCGATGCCACCTACGGCAAGCTGACCCTGAAGTTCATCTGCACCACCGGCAAG
CTGCCCGTGCCCTGGCCCACCCTCGTGACCACCCTGACCTACGGCGTGCAGTGCTTCAGCCGCT
ACCCCGACCACATGAAGCAGCACGACTTCTTCAAGTCCGCCATGCCCGAAGGCTACGTCCAGGA
GCGCACCATCTTCTTCAAGGACGACGGCAACTACAAGACCCGCGCCGAGGTGAAGTTCGAGGGC
GACACCCTGGTGAACCGCATCGAGCTGAAGGGCATCGACTTCAAGGAGGACGGCAACATCCTGG
GGCACAAGCTGGAGTACAACTACAACAGCCACAACGTCTATATCATGGCCGACAAGCAGAAGAA
CGGCATCAAGGTGAACTTCAAGATCCGCCACAACATCGAGGACGGCAGCGTGCAGCTCGCCGAC
CACTACCAGCAGAACACCCCCATCGGCGACGGCCCCGTGCTGCTGCCCGACAACCACTACCTGA
GCACCCAGTCCGCCCTGAGCAAAGACCCCAACGAGAAGCGCGATCACATGGTCCTGCTGGAGTT
CGTGACCGCCGCCGGGATCACTCTCGGCATGGACGAGCTGTACAAGGAGGGCAGAGGAAGTCTT
CTAACATGCGGTGACGTGGAGGAGAATCCTGGCCCGATGGTGAGCAAGGGCGAGGAGGATAACA
TGGCCATCATCAAGGAGTTCATGCGCTTCAAGGTGCACATGGAGGGCTCCGTGAACGGCCACGA
GTTCGAGATCGAGGGCGAGGGCGAGGGCCGCCCCTACGAGGGCACCCAGACCGCCAAGCTGAAG
GTGACCAAGGGTGGCCCCCTGCCCTTCGCCTGGGACATCCTGTCCCCTCAGTTCATGTACGGCT
CCAAGGCCTACGTGAAGCACCCCGCCGACATCCCCGACTACTTGAAGCTGTCCTTCCCCGAGGG
CTTCAAGTGGGAGCGCGTGATGAACTTCGAGGACGGCGGCGTGGTGACCGTGACCCAGGACTCC
TCCCTGCAGGACGGCGAGTTCATCTACAAGGTGAAGCTGCGCGGCACCAACTTCCCCTCCGACG
GCCCCGTAATGCAGAAGAAGACAATGGGCTGGGAGGCCTCCTCCGAGCGGATGTACCCCGAGGA
CGGCGCCCTGAAGGGCGAGATCAAGCAGAGGCTGAAGCTGAAGGACGGCGGCCACTACGACGCT
GAGGTCAAGACCACCTACAAGGCCAAGAAGCCCGTGCAGCTGCCCGGCGCCTACAACGTCAACA
TCAAGTTGGACATCACCTCCCACAACGAGGACTACACCATCGTGGAACAGTACGAACGCGCCGA
GGGCCGCCACTCCACCGGCGGCATGGACGAGCTGTACAAGTAAGCGGCCGCGTCGAGTCTAGAG
GGCCCGTTTAAACCCGCTGATCAGCCTCGACTGTGCCTTCTAGTTGCCAGCCATCTGTTGTTTG
CCCCTCCCCCGTGCCTTCCTTGACCCTGGAAGGTGCCACTCCCACTGTCCTTTCCTAATAAAAT
GAGGAAATTGCATCGCATTGTCTGAGTAGGTGTCATTCTATTCTGGGGGGTGGGGTGGGGCAGG
ACAGCAAGGGGGAGGATTGGGAAGACAATAGCAGGCATGCTGGGGATGCGGTGGGCTCTATGGA
TTTGGCTACAGCAACAGGGTGGTGGACCTCATGGCCCACATGGCCTCCAAGGAGTAAGACCCCT
GGACCACCAGCCCCAGCAAGAGCACAAGAGGAAGAGAGAGACCCTCACTGCTGGGGAGTCCCTG
CCACACTCAGTCCCCCACCACACTGAATCTCCCCTCCTCACAGTTGCCATGTAGACCCCTTGAA
GAGGGGAGGGGCCTAGGGAGCCGCACCTTGTCATGTACCATCAATAAAGTACCCTGTGCTCAAC
CAGTTACTTGTCCTGTCTTATTCTAGGGTCTGGGGCAGAGGGGAGGGAAGCTGGGCTTGTGTCA
AGGTGAGACATTCTTGCTGGGGAGGGACCTGGTATGTTCTCCTCAGACTGAGGGTAGGGCCTCC
AAACAGCCTTGCTTGCTTCGAGAACCATTTGCTTCCCGCTCAGACGTCTTGAGTGCTACAGGAA
GCTGGCACCACTACTTCAGAGAACAAGGCCTTTTCCTCTCCTCGCTCCAGT
exemplary donor template for insertion at GAPDH locus
SEQ ID NO: 39
GAAGACTGTGGATGGCCCCTCCGGGAAACTGTGGCGTGATGGCCGCGGGGCTCTCCAGAACATC
ATCCCTGCCTCTACTGGCGCTGCCAAGGCTGTGGGCAAGGTCATCCCTGAGCTGAACGGGAAGC
TCACTGGCATGGCCTTCCGTGTCCCCACTGCCAACGTGTCAGTGGTGGACCTGACCTGCCGTCT
AGAAAAACCTGCCAAATATGATGACATCAAGAAGGTGGTGAAGCAGGCGTCGGAGGGCCCCCTC
AAGGGCATCCTGGGCTACACTGAGCACCAGGTGGTCTCCTCTGACTTCAACAGCGACACCCACT
CCTCCACCTTTGACGCTGGGGCTGGCATTGCCCTCAACGACCACTTTGTCAAGCTCATTTCCTG
GTATGTGGCTGGGGCCAGAGACTGGCTCTTAAAAAGTGCAGGGTCTGGCGCCCTCTGGTGGCTG
GCTCAGAAAAAGGGCCCTGACAACTCTTTACATCTTCTAGGTATGACAACGAGTTCGGATATAG
CAATAGAGTGGTCGATCTGATGGCTCATATGGCTAGCAAAGAGGGAAGCGGAGCTACTAACTTC
AGCCTGCTGAAGCAGGCTGGAGACGTGGAGGAGAACCCTGGACCTATGGTGAGCAAGGGCGAGG
AGCTGTTCACCGGGGTGGTGCCCATCCTGGTCGAGCTGGACGGCGACGTAAACGGCCACAAGIT
CAGCGTGTCCGGCGAGGGCGAGGGCGATGCCACCTACGGCAAGCTGACCCTGAAGTTCATCTGC
ACCACCGGCAAGCTGCCCGTGCCCTGGCCCACCCTCGTGACCACCCTGACCTACGGCGTGCAGT
GCTTCAGCCGCTACCCCGACCACATGAAGCAGCACGACTTCTTCAAGTCCGCCATGCCCGAAGG
CTACGTCCAGGAGCGCACCATCTTCTTCAAGGACGACGGCAACTACAAGACCCGCGCCGAGGTG
AAGTTCGAGGGCGACACCCTGGTGAACCGCATCGAGCTGAAGGGCATCGACTTCAAGGAGGACG
GCAACATCCTGGGGCACAAGCTGGAGTACAACTACAACAGCCACAACGTCTATATCATGGCCGA
CAAGCAGAAGAACGGCATCAAGGTGAACTTCAAGATCCGCCACAACATCGAGGACGGCAGCGTG
CAGCTCGCCGACCACTACCAGCAGAACACCCCCATCGGCGACGGCCCCGTGCTGCTGCCCGACA
ACCACTACCTGAGCACCCAGTCCGCCCTGAGCAAAGACCCCAACGAGAAGCGCGATCACATGGT
CCTGCTGGAGTTCGTGACCGCCGCCGGGATCACTCTCGGCATGGACGAGCTGTACAAGTAACCC
CTCTCCCTCCCCCCCCCCTAACGTTACTGGCCGAAGCCGCTTGGAATAAGGCCGGTGTGCGTTT
GTCTATATGTTATTTTCCACCATATTGCCGTCTTTTGGCAATGTGAGGGCCCGGAAACCTGGCC
CTGTCTTCTTGACGAGCATTCCTAGGGGTCTTTCCCCTCTCGCCAAAGGAATGCAAGGTCTGTT
GAATGTCGTGAAGGAAGCAGTTCCTCTGGAAGCTTCTTGAAGACAAACAACGTCTGTAGCGACC
CTTTGCAGGCAGCGGAACCCCCCACCTGGCGACAGGTGCCTCTGCGGCCAAAAGCCACGTGTAT
AAGATACACCTGCAAAGGCGGCACAACCCCAGTGCCACGTTGTGAGTTGGATAGTTGTGGAAAG
AGTCAAATGGCTCTCCTCAAGCGTATTCAACAAGGGGCTGAAGGATGCCCAGAAGGTACCCCAT
TGTATGGGATCTGATCTGGGGCCTCGGTGCACATGCTTTACATGTGTTTAGTCGAGGTTAAAAA
AACGTCTAGGCCCCCCGAACCACGGGGACGTGGTTTTCCTTTGAAAAACACGATGATAAATGGT
GAGCAAGGGCGAGGAGGATAACATGGCCATCATCAAGGAGTTCATGCGCTTCAAGGTGCACATG
GAGGGCTCCGTGAACGGCCACGAGTTCGAGATCGAGGGCGAGGGCGAGGGCCGCCCCTACGAGG
GCACCCAGACCGCCAAGCTGAAGGTGACCAAGGGTGGCCCCCTGCCCTTCGCCTGGGACATCCT
GTCCCCTCAGTTCATGTACGGCTCCAAGGCCTACGTGAAGCACCCCGCCGACATCCCCGACTAC
TTGAAGCTGTCCTTCCCCGAGGGCTTCAAGTGGGAGCGCGTGATGAACTTCGAGGACGGCGGCG
TGGTGACCGTGACCCAGGACTCCTCCCTGCAGGACGGCGAGTTCATCTACAAGGTGAAGCTGCG
CGGCACCAACTTCCCCTCCGACGGCCCCGTAATGCAGAAGAAGACAATGGGCTGGGAGGCCTCC
TCCGAGCGGATGTACCCCGAGGACGGCGCCCTGAAGGGCGAGATCAAGCAGAGGCTGAAGCTGA
AGGACGGCGGCCACTACGACGCTGAGGTCAAGACCACCTACAAGGCCAAGAAGCCCGTGCAGCT
GCCCGGCGCCTACAACGTCAACATCAAGTTGGACATCACCTCCCACAACGAGGACTACACCATC
GTGGAACAGTACGAACGCGCCGAGGGCCGCCACTCCACCGGCGGCATGGACGAGCTGTACAAGT
AAGCGGCCGCGTCGAGTCTAGAGGGCCCGTTTAAACCCGCTGATCAGCCTCGACTGTGCCTTCT
AGTTGCCAGCCATCTGTTGTTTGCCCCTCCCCCGTGCCTTCCTTGACCCTGGAAGGTGCCACTC
CCACTGTCCTTTCCTAATAAAATGAGGAAATTGCATCGCATTGTCTGAGTAGGTGTCATTCTAT
TCTGGGGGGTGGGGTGGGGCAGGACAGCAAGGGGGAGGATTGGGAAGACAATAGCAGGCATGCT
GGGGATGCGGTGGGCTCTATGGATTTGGCTACAGCAACAGGGTGGTGGACCTCATGGCCCACAT
GGCCTCCAAGGAGTAAGACCCCTGGACCACCAGCCCCAGCAAGAGCACAAGAGGAAGAGAGAGA
CCCTCACTGCTGGGGAGTCCCTGCCACACTCAGTCCCCCACCACACTGAATCTCCCCTCCTCAC
AGTTGCCATGTAGACCCCTTGAAGAGGGGAGGGGCCTAGGGAGCCGCACCTTGTCATGTACCAT
CAATAAAGTACCCTGTGCTCAACCAGTTACTTGTCCTGTCTTATTCTAGGGTCTGGGGCAGAGG
GGAGGGAAGCTGGGCTTGTGTCAAGGTGAGACATTCTTGCTGGGGAGGGACCTGGTATGTTCTC
CTCAGACTGAGGGTAGGGCCTCCAAACAGCCTTGCTTGCTTCGAGAACCATTTGCTTCCCGCTC
AGACGTCTTGAGTGCTACAGGAAGCTGGCACCACTACTTCAGAGAACAAGGCCTTTTCCTCTCC
TCGCTCCAGT
exemplary donor template for insertion at GAPDH locus
SEQ ID NO: 40
GAAGACTGTGGATGGCCCCTCCGGGAAACTGTGGCGTGATGGCCGCGGGGCTCTCCAGAACATC
ATCCCTGCCTCTACTGGCGCTGCCAAGGCTGTGGGCAAGGTCATCCCTGAGCTGAACGGGAAGC
TCACTGGCATGGCCTTCCGTGTCCCCACTGCCAACGTGTCAGTGGTGGACCTGACCTGCCGTCT
AGAAAAACCTGCCAAATATGATGACATCAAGAAGGTGGTGAAGCAGGCGTCGGAGGGCCCCCTC
AAGGGCATCCTGGGCTACACTGAGCACCAGGTGGTCTCCTCTGACTTCAACAGCGACACCCACT
CCTCCACCTTTGACGCTGGGGCTGGCATTGCCCTCAACGACCACTTTGTCAAGCTCATTTCCTG
GTATGTGGCTGGGGCCAGAGACTGGCTCTTAAAAAGTGCAGGGTCTGGCGCCCTCTGGTGGCTG
GCTCAGAAAAAGGGCCCTGACAACTCTTTACATCTTCTAGGTATGACAACGAGTTCGGATATAG
CAATAGAGTGGTCGATCTGATGGCTCATATGGCTAGCAAAGAGGGAAGCGGAGCTACTAACTTC
AGCCTGCTGAAGCAGGCTGGAGACGTGGAGGAGAACCCTGGACCTATGGTGAGCAAGGGCGAGG
AGCTGTTCACCGGGGTGGTGCCCATCCTGGTCGAGCTGGACGGCGACGTAAACGGCCACAAGTT
CAGCGTGTCCGGCGAGGGCGAGGGCGATGCCACCTACGGCAAGCTGACCCTGAAGTTCATCTGC
ACCACCGGCAAGCTGCCCGTGCCCTGGCCCACCCTCGTGACCACCCTGACCTACGGCGTGCAGT
GCTTCAGCCGCTACCCCGACCACATGAAGCAGCACGACTTCTTCAAGTCCGCCATGCCCGAAGG
CTACGTCCAGGAGCGCACCATCTTCTTCAAGGACGACGGCAACTACAAGACCCGCGCCGAGGTG
AAGTTCGAGGGCGACACCCTGGTGAACCGCATCGAGCTGAAGGGCATCGACTTCAAGGAGGACG
GCAACATCCTGGGGCACAAGCTGGAGTACAACTACAACAGCCACAACGTCTATATCATGGCCGA
CAAGCAGAAGAACGGCATCAAGGTGAACTTCAAGATCCGCCACAACATCGAGGACGGCAGCGTG
CAGCTCGCCGACCACTACCAGCAGAACACCCCCATCGGCGACGGCCCCGTGCTGCTGCCCGACA
ACCACTACCTGAGCACCCAGTCCGCCCTGAGCAAAGACCCCAACGAGAAGCGCGATCACATGGT
CCTGCTGGAGTTCGTGACCGCCGCCGGGATCACTCTCGGCATGGACGAGCTGTACAAGGGAAGC
GGAGCTACTAACTTCAGCCTGCTGAAGCAGGCTGGAGACGTGGAGGAGAACCCTGGACCTATGG
TGAGCAAGGGCGAGGAGGATAACATGGCCATCATCAAGGAGTTCATGCGCTTCAAGGTGCACAT
GGAGGGCTCCGTGAACGGCCACGAGTTCGAGATCGAGGGCGAGGGCGAGGGCCGCCCCTACGAG
GGCACCCAGACCGCCAAGCTGAAGGTGACCAAGGGTGGCCCCCTGCCCTTCGCCTGGGACATCC
TGTCCCCTCAGTTCATGTACGGCTCCAAGGCCTACGTGAAGCACCCCGCCGACATCCCCGACTA
CTTGAAGCTGTCCTTCCCCGAGGGCTTCAAGTGGGAGCGCGTGATGAACTTCGAGGACGGCGGC
GTGGTGACCGTGACCCAGGACTCCTCCCTGCAGGACGGCGAGTTCATCTACAAGGTGAAGCTGC
GCGGCACCAACTTCCCCTCCGACGGCCCCGTAATGCAGAAGAAGACAATGGGCTGGGAGGCCTC
CTCCGAGCGGATGTACCCCGAGGACGGCGCCCTGAAGGGCGAGATCAAGCAGAGGCTGAAGCTG
AAGGACGGCGGCCACTACGACGCTGAGGTCAAGACCACCTACAAGGCCAAGAAGCCCGTGCAGC
TGCCCGGCGCCTACAACGTCAACATCAAGTTGGACATCACCTCCCACAACGAGGACTACACCAT
CGTGGAACAGTACGAACGCGCCGAGGGCCGCCACTCCACCGGCGGCATGGACGAGCTGTACAAG
TAAGCGGCCGCGTCGAGTCTAGAGGGCCCGTTTAAACCCGCTGATCAGCCTCGACTGTGCCTTC
TAGTTGCCAGCCATCTGTTGTTTGCCCCTCCCCCGTGCCTTCCTTGACCCTGGAAGGTGCCACT
CCCACTGTCCTTTCCTAATAAAATGAGGAAATTGCATCGCATTGTCTGAGTAGGTGTCATTCTA
TTCTGGGGGGTGGGGTGGGGCAGGACAGCAAGGGGGAGGATTGGGAAGACAATAGCAGGCATGC
TGGGGATGCGGTGGGCTCTATGGATTTGGCTACAGCAACAGGGTGGTGGACCTCATGGCCCACA
TGGCCTCCAAGGAGTAAGACCCCTGGACCACCAGCCCCAGCAAGAGCACAAGAGGAAGAGAGAG
ACCCTCACTGCTGGGGAGTCCCTGCCACACTCAGTCCCCCACCACACTGAATCTCCCCTCCTCA
CAGTTGCCATGTAGACCCCTTGAAGAGGGGAGGGGCCTAGGGAGCCGCACCTTGTCATGTACCA
TCAATAAAGTACCCTGTGCTCAACCAGTTACTTGTCCTGTCTTATTCTAGGGTCTGGGGCAGAG
GGGAGGGAAGCTGGGCTTGTGTCAAGGTGAGACATTCTTGCTGGGGAGGGACCTGGTATGTTCT
CCTCAGACTGAGGGTAGGGCCTCCAAACAGCCTTGCTTGCTTCGAGAACCATTTGCTTCCCGCT
CAGACGTCTTGAGTGCTACAGGAAGCTGGCACCACTACTTCAGAGAACAAGGCCTTTTCCTCTC
CTCGCTCCAGT
exemplary donor template for insertion at GAPDH locus
SEQ ID NO: 41
GAAGACTGTGGATGGCCCCTCCGGGAAACTGTGGCGTGATGGCCGCGGGGCTCTCCAGAACATC
ATCCCTGCCTCTACTGGCGCTGCCAAGGCTGTGGGCAAGGTCATCCCTGAGCTGAACGGGAAGC
TCACTGGCATGGCCTTCCGTGTCCCCACTGCCAACGTGTCAGTGGTGGACCTGACCTGCCGTCT
AGAAAAACCTGCCAAATATGATGACATCAAGAAGGTGGTGAAGCAGGCGTCGGAGGGCCCCCTC
AAGGGCATCCTGGGCTACACTGAGCACCAGGTGGTCTCCTCTGACTTCAACAGCGACACCCACT
CCTCCACCTTTGACGCTGGGGCTGGCATTGCCCTCAACGACCACTTTGTCAAGCTCATTTCCTG
GTATGTGGCTGGGGCCAGAGACTGGCTCTTAAAAAGTGCAGGGTCTGGCGCCCTCTGGTGGCTG
GCTCAGAAAAAGGGCCCTGACAACTCTTTACATCTTCTAGGTATGACAACGAGTTCGGATATAG
CAATAGAGTGGTCGATCTGATGGCTCATATGGCTAGCAAAGAGGGAAGCGGAGCTACTAACTTC
AGCCTGCTGAAGCAGGCTGGAGACGTGGAGGAGAACCCTGGACCTATGGTGAGCAAGGGCGAGG
AGCTGTTCACCGGGGTGGTGCCCATCCTGGTCGAGCTGGACGGCGACGTAAACGGCCACAAGIT
CAGCGTGTCCGGCGAGGGCGAGGGCGATGCCACCTACGGCAAGCTGACCCTGAAGTTCATCTGC
ACCACCGGCAAGCTGCCCGTGCCCTGGCCCACCCTCGTGACCACCCTGACCTACGGCGTGCAGT
GCTTCAGCCGCTACCCCGACCACATGAAGCAGCACGACTTCTTCAAGTCCGCCATGCCCGAAGG
CTACGTCCAGGAGCGCACCATCTTCTTCAAGGACGACGGCAACTACAAGACCCGCGCCGAGGTG
AAGTTCGAGGGCGACACCCTGGTGAACCGCATCGAGCTGAAGGGCATCGACTTCAAGGAGGACG
GCAACATCCTGGGGCACAAGCTGGAGTACAACTACAACAGCCACAACGTCTATATCATGGCCGA
CAAGCAGAAGAACGGCATCAAGGTGAACTTCAAGATCCGCCACAACATCGAGGACGGCAGCGTG
CAGCTCGCCGACCACTACCAGCAGAACACCCCCATCGGCGACGGCCCCGTGCTGCTGCCCGACA
ACCACTACCTGAGCACCCAGTCCGCCCTGAGCAAAGACCCCAACGAGAAGCGCGATCACATGGT
CCTGCTGGAGTTCGTGACCGCCGCCGGGATCACTCTCGGCATGGACGAGCTGTACAAGGAGGGC
AGAGGAAGTCTTCTAACATGCGGTGACGTGGAGGAGAATCCTGGCCCGATGGTGAGCAAGGGCG
AGGAGGATAACATGGCCATCATCAAGGAGTTCATGCGCTTCAAGGTGCACATGGAGGGCTCCGT
GAACGGCCACGAGTTCGAGATCGAGGGCGAGGGCGAGGGCCGCCCCTACGAGGGCACCCAGACC
GCCAAGCTGAAGGTGACCAAGGGTGGCCCCCTGCCCTTCGCCTGGGACATCCTGTCCCCTCAGT
TCATGTACGGCTCCAAGGCCTACGTGAAGCACCCCGCCGACATCCCCGACTACTTGAAGCTGTC
CTTCCCCGAGGGCTTCAAGTGGGAGCGCGTGATGAACTTCGAGGACGGCGGCGTGGTGACCGTG
ACCCAGGACTCCTCCCTGCAGGACGGCGAGTTCATCTACAAGGTGAAGCTGCGCGGCACCAACT
TCCCCTCCGACGGCCCCGTAATGCAGAAGAAGACAATGGGCTGGGAGGCCTCCTCCGAGCGGAT
GTACCCCGAGGACGGCGCCCTGAAGGGCGAGATCAAGCAGAGGCTGAAGCTGAAGGACGGCGGC
CACTACGACGCTGAGGTCAAGACCACCTACAAGGCCAAGAAGCCCGTGCAGCTGCCCGGCGCCT
ACAACGTCAACATCAAGTTGGACATCACCTCCCACAACGAGGACTACACCATCGTGGAACAGTA
CGAACGCGCCGAGGGCCGCCACTCCACCGGCGGCATGGACGAGCTGTACAAGTAAGCGGCCGCG
TCGAGTCTAGAGGGCCCGTTTAAACCCGCTGATCAGCCTCGACTGTGCCTTCTAGTTGCCAGCC
ATCTGTTGTTTGCCCCTCCCCCGTGCCTTCCTTGACCCTGGAAGGTGCCACTCCCACTGTCCTT
TCCTAATAAAATGAGGAAATTGCATCGCATTGTCTGAGTAGGTGTCATTCTATTCTGGGGGGTG
GGGTGGGGCAGGACAGCAAGGGGGAGGATTGGGAAGACAATAGCAGGCATGCTGGGGATGCGGT
GGGCTCTATGGATTTGGCTACAGCAACAGGGTGGTGGACCTCATGGCCCACATGGCCTCCAAGG
AGTAAGACCCCTGGACCACCAGCCCCAGCAAGAGCACAAGAGGAAGAGAGAGACCCTCACTGCT
GGGGAGTCCCTGCCACACTCAGTCCCCCACCACACTGAATCTCCCCTCCTCACAGTTGCCATGT
AGACCCCTTGAAGAGGGGAGGGGCCTAGGGAGCCGCACCTTGTCATGTACCATCAATAAAGTAC
CCTGTGCTCAACCAGTTACTTGTCCTGTCTTATTCTAGGGTCTGGGGCAGAGGGGAGGGAAGCT
GGGCTTGTGTCAAGGTGAGACATTCTTGCTGGGGAGGGACCTGGTATGTTCTCCTCAGACTGAG
GGTAGGGCCTCCAAACAGCCTTGCTTGCTTCGAGAACCATTTGCTTCCCGCTCAGACGTCTTGA
GTGCTACAGGAAGCTGGCACCACTACTTCAGAGAACAAGGCCTTTTCCTCTCCTCGCTCCAGT
exemplary donor template for insertion at GAPDH locus
SEQ ID NO: 42
GAAGACTGTGGATGGCCCCTCCGGGAAACTGTGGCGTGATGGCCGCGGGGCTCTCCAGAACATC
ATCCCTGCCTCTACTGGCGCTGCCAAGGCTGTGGGCAAGGTCATCCCTGAGCTGAACGGGAAGC
TCACTGGCATGGCCTTCCGTGTCCCCACTGCCAACGTGTCAGTGGTGGACCTGACCTGCCGTCT
AGAAAAACCTGCCAAATATGATGACATCAAGAAGGTGGTGAAGCAGGCGTCGGAGGGCCCCCTC
AAGGGCATCCTGGGCTACACTGAGCACCAGGTGGTCTCCTCTGACTTCAACAGCGACACCCACT
CCTCCACCTTTGACGCTGGGGCTGGCATTGCCCTCAACGACCACTTTGTCAAGCTCATTTCCTG
GTATGTGGCTGGGGCCAGAGACTGGCTCTTAAAAAGTGCAGGGTCTGGCGCCCTCTGGTGGCTG
GCTCAGAAAAAGGGCCCTGACAACTCTTTACATCTTCTAGGTATGACAACGAGTTCGGATATAG
CAATAGAGTGGTCGATCTGATGGCTCATATGGCTAGCAAAGAGGAGGGCAGAGGAAGTCTTCTA
ACATGCGGTGACGTGGAGGAGAATCCTGGCCCGATGGTGAGCAAGGGCGAGGAGCTGTTCACCG
GGGTGGTGCCCATCCTGGTCGAGCTGGACGGCGACGTAAACGGCCACAAGTTCAGCGTGTCCGG
CGAGGGCGAGGGCGATGCCACCTACGGCAAGCTGACCCTGAAGTTCATCTGCACCACCGGCAAG
CTGCCCGTGCCCTGGCCCACCCTCGTGACCACCCTGACCTACGGCGTGCAGTGCTTCAGCCGCT
ACCCCGACCACATGAAGCAGCACGACTTCTTCAAGTCCGCCATGCCCGAAGGCTACGTCCAGGA
GCGCACCATCTTCTTCAAGGACGACGGCAACTACAAGACCCGCGCCGAGGTGAAGTTCGAGGGC
GACACCCTGGTGAACCGCATCGAGCTGAAGGGCATCGACTTCAAGGAGGACGGCAACATCCTGG
GGCACAAGCTGGAGTACAACTACAACAGCCACAACGTCTATATCATGGCCGACAAGCAGAAGAA
CGGCATCAAGGTGAACTTCAAGATCCGCCACAACATCGAGGACGGCAGCGTGCAGCTCGCCGAC
CACTACCAGCAGAACACCCCCATCGGCGACGGCCCCGTGCTGCTGCCCGACAACCACTACCTGA
GCACCCAGTCCGCCCTGAGCAAAGACCCCAACGAGAAGCGCGATCACATGGTCCTGCTGGAGTT
CGTGACCGCCGCCGGGATCACTCTCGGCATGGACGAGCTGTACAAGGGAAGCGGAGCTACTAAC
TTCAGCCTGCTGAAGCAGGCTGGAGACGTGGAGGAGAACCCTGGACCTATGGTGAGCAAGGGCG
AGGAGGATAACATGGCCATCATCAAGGAGTTCATGCGCTTCAAGGTGCACATGGAGGGCTCCGT
GAACGGCCACGAGTTCGAGATCGAGGGCGAGGGCGAGGGCCGCCCCTACGAGGGCACCCAGACC
GCCAAGCTGAAGGTGACCAAGGGTGGCCCCCTGCCCTTCGCCTGGGACATCCTGTCCCCTCAGT
TCATGTACGGCTCCAAGGCCTACGTGAAGCACCCCGCCGACATCCCCGACTACTTGAAGCTGTC
CTTCCCCGAGGGCTTCAAGTGGGAGCGCGTGATGAACTTCGAGGACGGCGGCGTGGTGACCGTG
ACCCAGGACTCCTCCCTGCAGGACGGCGAGTTCATCTACAAGGTGAAGCTGCGCGGCACCAACT
TCCCCTCCGACGGCCCCGTAATGCAGAAGAAGACAATGGGCTGGGAGGCCTCCTCCGAGCGGAT
GTACCCCGAGGACGGCGCCCTGAAGGGCGAGATCAAGCAGAGGCTGAAGCTGAAGGACGGCGGC
CACTACGACGCTGAGGTCAAGACCACCTACAAGGCCAAGAAGCCCGTGCAGCTGCCCGGCGCCT
ACAACGTCAACATCAAGTTGGACATCACCTCCCACAACGAGGACTACACCATCGTGGAACAGTA
CGAACGCGCCGAGGGCCGCCACTCCACCGGCGGCATGGACGAGCTGTACAAGTAAGCGGCCGCG
TCGAGTCTAGAGGGCCCGTTTAAACCCGCTGATCAGCCTCGACTGTGCCTTCTAGTTGCCAGCC
ATCTGTTGTTTGCCCCTCCCCCGTGCCTTCCTTGACCCTGGAAGGTGCCACTCCCACTGTCCTT
TCCTAATAAAATGAGGAAATTGCATCGCATTGTCTGAGTAGGTGTCATTCTATTCTGGGGGGTG
GGGTGGGGCAGGACAGCAAGGGGGAGGATTGGGAAGACAATAGCAGGCATGCTGGGGATGCGGT
GGGCTCTATGGATTTGGCTACAGCAACAGGGTGGTGGACCTCATGGCCCACATGGCCTCCAAGG
AGTAAGACCCCTGGACCACCAGCCCCAGCAAGAGCACAAGAGGAAGAGAGAGACCCTCACTGCT
GGGGAGTCCCTGCCACACTCAGTCCCCCACCACACTGAATCTCCCCTCCTCACAGTTGCCATGT
AGACCCCTTGAAGAGGGGAGGGGCCTAGGGAGCCGCACCTTGTCATGTACCATCAATAAAGTAC
CCTGTGCTCAACCAGTTACTTGTCCTGTCTTATTCTAGGGTCTGGGGCAGAGGGGAGGGAAGCT
GGGCTTGTGTCAAGGTGAGACATTCTTGCTGGGGAGGGACCTGGTATGTTCTCCTCAGACTGAG
GGTAGGGCCTCCAAACAGCCTTGCTTGCTTCGAGAACCATTTGCTTCCCGCTCAGACGTCTTGA
GTGCTACAGGAAGCTGGCACCACTACTTCAGAGAACAAGGCCTTTTCCTCTCCTCGCTCCAGT
exemplary donor template for insertion at GAPDH locus
SEQ ID NO: 43
GAAGACTGTGGATGGCCCCTCCGGGAAACTGTGGCGTGATGGCCGCGGGGCTCTCCAGAACATC
ATCCCTGCCTCTACTGGCGCTGCCAAGGCTGTGGGCAAGGTCATCCCTGAGCTGAACGGGAAGC
TCACTGGCATGGCCTTCCGTGTCCCCACTGCCAACGTGTCAGTGGTGGACCTGACCTGCCGTCT
AGAAAAACCTGCCAAATATGATGACATCAAGAAGGTGGTGAAGCAGGCGTCGGAGGGCCCCCTC
AAGGGCATCCTGGGCTACACTGAGCACCAGGTGGTCTCCTCTGACTTCAACAGCGACACCCACT
CCTCCACCTTTGACGCTGGGGCTGGCATTGCCCTCAACGACCACTTTGTCAAGCTCATTTCCTG
GTATGTGGCTGGGGCCAGAGACTGGCTCTTAAAAAGTGCAGGGTCTGGCGCCCTCTGGTGGCTG
GCTCAGAAAAAGGGCCCTGACAACTCTTTACATCTTCTAGGTATGACAACGAGTTCGGATATAG
CAATAGAGTGGTCGATCTGATGGCTCATATGGCTAGCAAAGAGGAGGGCAGAGGAAGTCTTCTA
ACATGCGGTGACGTGGAGGAGAATCCTGGCCCGATGGTGAGCAAGGGCGAGGAGCTGTTCACCG
GGGTGGTGCCCATCCTGGTCGAGCTGGACGGCGACGTAAACGGCCACAAGTTCAGCGTGTCCGG
CGAGGGCGAGGGCGATGCCACCTACGGCAAGCTGACCCTGAAGTTCATCTGCACCACCGGCAAG
CTGCCCGTGCCCTGGCCCACCCTCGTGACCACCCTGACCTACGGCGTGCAGTGCTTCAGCCGCT
ACCCCGACCACATGAAGCAGCACGACTTCTTCAAGTCCGCCATGCCCGAAGGCTACGTCCAGGA
GCGCACCATCTTCTTCAAGGACGACGGCAACTACAAGACCCGCGCCGAGGTGAAGTTCGAGGGC
GACACCCTGGTGAACCGCATCGAGCTGAAGGGCATCGACTTCAAGGAGGACGGCAACATCCTGG
GGCACAAGCTGGAGTACAACTACAACAGCCACAACGTCTATATCATGGCCGACAAGCAGAAGAA
CGGCATCAAGGTGAACTTCAAGATCCGCCACAACATCGAGGACGGCAGCGTGCAGCTCGCCGAC
CACTACCAGCAGAACACCCCCATCGGCGACGGCCCCGTGCTGCTGCCCGACAACCACTACCTGA
GCACCCAGTCCGCCCTGAGCAAAGACCCCAACGAGAAGCGCGATCACATGGTCCTGCTGGAGTT
CGTGACCGCCGCCGGGATCACTCTCGGCATGGACGAGCTGTACAAGTAACCCCTCTCCCTCCCC
CCCCCCTAACGTTACTGGCCGAAGCCGCTTGGAATAAGGCCGGTGTGCGTTTGTCTATATGTTA
TTTTCCACCATATTGCCGTCTTTTGGCAATGTGAGGGCCCGGAAACCTGGCCCTGTCTTCTTGA
CGAGCATTCCTAGGGGTCTTTCCCCTCTCGCCAAAGGAATGCAAGGTCTGTTGAATGTCGTGAA
GGAAGCAGTTCCTCTGGAAGCTTCTTGAAGACAAACAACGTCTGTAGCGACCCTTTGCAGGCAG
CGGAACCCCCCACCTGGCGACAGGTGCCTCTGCGGCCAAAAGCCACGTGTATAAGATACACCTG
CAAAGGCGGCACAACCCCAGTGCCACGTTGTGAGTTGGATAGTTGTGGAAAGAGTCAAATGGCT
CTCCTCAAGCGTATTCAACAAGGGGCTGAAGGATGCCCAGAAGGTACCCCATTGTATGGGATCT
GATCTGGGGCCTCGGTGCACATGCTTTACATGTGTTTAGTCGAGGTTAAAAAAACGTCTAGGCC
CCCCGAACCACGGGGACGTGGTTTTCCTTTGAAAAACACGATGATAAATGGTGAGCAAGGGCGA
GGAGGATAACATGGCCATCATCAAGGAGTTCATGCGCTTCAAGGTGCACATGGAGGGCTCCGTG
AACGGCCACGAGTTCGAGATCGAGGGCGAGGGCGAGGGCCGCCCCTACGAGGGCACCCAGACCG
CCAAGCTGAAGGTGACCAAGGGTGGCCCCCTGCCCTTCGCCTGGGACATCCTGTCCCCTCAGTT
CATGTACGGCTCCAAGGCCTACGTGAAGCACCCCGCCGACATCCCCGACTACTTGAAGCTGTCC
TTCCCCGAGGGCTTCAAGTGGGAGCGCGTGATGAACTTCGAGGACGGCGGCGTGGTGACCGTGA
CCCAGGACTCCTCCCTGCAGGACGGCGAGTTCATCTACAAGGTGAAGCTGCGCGGCACCAACTT
CCCCTCCGACGGCCCCGTAATGCAGAAGAAGACAATGGGCTGGGAGGCCTCCTCCGAGCGGATG
TACCCCGAGGACGGCGCCCTGAAGGGCGAGATCAAGCAGAGGCTGAAGCTGAAGGACGGCGGCC
ACTACGACGCTGAGGTCAAGACCACCTACAAGGCCAAGAAGCCCGTGCAGCTGCCCGGCGCCTA
CAACGTCAACATCAAGTTGGACATCACCTCCCACAACGAGGACTACACCATCGTGGAACAGTAC
GAACGCGCCGAGGGCCGCCACTCCACCGGCGGCATGGACGAGCTGTACAAGTAAGCGGCCGCGT
CGAGTCTAGAGGGCCCGTTTAAACCCGCTGATCAGCCTCGACTGTGCCTTCTAGTTGCCAGCCA
TCTGTTGTTTGCCCCTCCCCCGTGCCTTCCTTGACCCTGGAAGGTGCCACTCCCACTGTCCTTT
CCTAATAAAATGAGGAAATTGCATCGCATTGTCTGAGTAGGTGTCATTCTATTCTGGGGGGTGG
GGTGGGGCAGGACAGCAAGGGGGAGGATTGGGAAGACAATAGCAGGCATGCTGGGGATGCGGTG
GGCTCTATGGATTTGGCTACAGCAACAGGGTGGTGGACCTCATGGCCCACATGGCCTCCAAGGA
GTAAGACCCCTGGACCACCAGCCCCAGCAAGAGCACAAGAGGAAGAGAGAGACCCTCACTGCTG
GGGAGTCCCTGCCACACTCAGTCCCCCACCACACTGAATCTCCCCTCCTCACAGTTGCCATGTA
GACCCCTTGAAGAGGGGAGGGGCCTAGGGAGCCGCACCTTGTCATGTACCATCAATAAAGTACC
CTGTGCTCAACCAGTTACTTGTCCTGTCTTATTCTAGGGTCTGGGGCAGAGGGGAGGGAAGCTG
GGCTTGTGTCAAGGTGAGACATTCTTGCTGGGGAGGGACCTGGTATGTTCTCCTCAGACTGAGG
GTAGGGCCTCCAAACAGCCTTGCTTGCTTCGAGAACCATTTGCTTCCCGCTCAGACGTCTTGAG
TGCTACAGGAAGCTGGCACCACTACTTCAGAGAACAAGGCCTTTTCCTCTCCTCGCTCCAGT
exemplary donor template for insertion at GAPDH locus
SEQ ID NO: 44
GAAGACTGTGGATGGCCCCTCCGGGAAACTGTGGCGTGATGGCCGCGGGGCTCTCCAGAACATC
ATCCCTGCCTCTACTGGCGCTGCCAAGGCTGTGGGCAAGGTCATCCCTGAGCTGAACGGGAAGC
TCACTGGCATGGCCTTCCGTGTCCCCACTGCCAACGTGTCAGTGGTGGACCTGACCTGCCGTCT
AGAAAAACCTGCCAAATATGATGACATCAAGAAGGTGGTGAAGCAGGCGTCGGAGGGCCCCCTC
AAGGGCATCCTGGGCTACACTGAGCACCAGGTGGTCTCCTCTGACTTCAACAGCGACACCCACT
CCTCCACCTTTGACGCTGGGGCTGGCATTGCCCTCAACGACCACTTTGTCAAGCTCATTTCCTG
GTATGTGGCTGGGGCCAGAGACTGGCTCTTAAAAAGTGCAGGGTCTGGCGCCCTCTGGTGGCTG
GCTCAGAAAAAGGGCCCTGACAACTCTTTACATCTTCTAGGTATGACAACGAGTTCGGATATAG
CAATAGAGTGGTCGATCTGATGGCTCATATGGCTAGCAAAGAGGGAAGCGGAGCTACTAACTTC
AGCCTGCTGAAGCAGGCTGGAGACGTGGAGGAGAACCCTGGACCTATGGTGAGCAAGGGCGAGG
AGCTGTTCACCGGGGTGGTGCCCATCCTGGTCGAGCTGGACGGCGACGTAAACGGCCACAAGTT
CAGCGTGTCCGGCGAGGGCGAGGGCGATGCCACCTACGGCAAGCTGACCCTGAAGTTCATCTGC
ACCACCGGCAAGCTGCCCGTGCCCTGGCCCACCCTCGTGACCACCCTGACCTACGGCGTGCAGT
GCTTCAGCCGCTACCCCGACCACATGAAGCAGCACGACTTCTTCAAGTCCGCCATGCCCGAAGG
CTACGTCCAGGAGCGCACCATCTTCTTCAAGGACGACGGCAACTACAAGACCCGCGCCGAGGTG
AAGTTCGAGGGCGACACCCTGGTGAACCGCATCGAGCTGAAGGGCATCGACTTCAAGGAGGACG
GCAACATCCTGGGGCACAAGCTGGAGTACAACTACAACAGCCACAACGTCTATATCATGGCCGA
CAAGCAGAAGAACGGCATCAAGGTGAACTTCAAGATCCGCCACAACATCGAGGACGGCAGCGTG
CAGCTCGCCGACCACTACCAGCAGAACACCCCCATCGGCGACGGCCCCGTGCTGCTGCCCGACA
ACCACTACCTGAGCACCCAGTCCGCCCTGAGCAAAGACCCCAACGAGAAGCGCGATCACATGGT
CCTGCTGGAGTTCGTGACCGCCGCCGGGATCACTCTCGGCATGGACGAGCTGTACAAGTGAGCG
GCCGCGTCGAGTCTAGAGGGCCCGTTTAAACCCGCTGATCAGCCTCGACTGTGCCTTCTAGTTG
CCAGCCATCTGTTGTTTGCCCCTCCCCCGTGCCTTCCTTGACCCTGGAAGGTGCCACTCCCACT
GTCCTTTCCTAATAAAATGAGGAAATTGCATCGCATTGTCTGAGTAGGTGTCATTCTATTCTGG
GGGGTGGGGTGGGGCAGGACAGCAAGGGGGAGGATTGGGAAGACAATAGCAGGCATGCTGGGGA
TGCGGTGGGCTCTATGGATTTGGCTACAGCAACAGGGTGGTGGACCTCATGGCCCACATGGCCT
CCAAGGAGTAAGACCCCTGGACCACCAGCCCCAGCAAGAGCACAAGAGGAAGAGAGAGACCCTC
ACTGCTGGGGAGTCCCTGCCACACTCAGTCCCCCACCACACTGAATCTCCCCTCCTCACAGTTG
CCATGTAGACCCCTTGAAGAGGGGAGGGGCCTAGGGAGCCGCACCTTGTCATGTACCATCAATA
AAGTACCCTGTGCTCAACCAGTTACTTGTCCTGTCTTATTCTAGGGTCTGGGGCAGAGGGGAGG
GAAGCTGGGCTTGTGTCAAGGTGAGACATTCTTGCTGGGGAGGGACCTGGTATGTTCTCCTCAG
ACTGAGGGTAGGGCCTCCAAACAGCCTTGCTTGCTTCGAGAACCATTTGCTTCCCGCTCAGACG
TCTTGAGTGCTACAGGAAGCTGGCACCACTACTTCAGAGAACAAGGCCTTTTCCTCTCCTCGCT
CCAGT
exemplary donor template for insertion at GAPDH locus
SEQ ID NO: 45
GAAGACTGTGGATGGCCCCTCCGGGAAACTGTGGCGTGATGGCCGCGGGGCTCTCCAGAACATC
ATCCCTGCCTCTACTGGCGCTGCCAAGGCTGTGGGCAAGGTCATCCCTGAGCTGAACGGGAAGC
TCACTGGCATGGCCTTCCGTGTCCCCACTGCCAACGTGTCAGTGGTGGACCTGACCTGCCGTCT
AGAAAAACCTGCCAAATATGATGACATCAAGAAGGTGGTGAAGCAGGCGTCGGAGGGCCCCCTC
AAGGGCATCCTGGGCTACACTGAGCACCAGGTGGTCTCCTCTGACTTCAACAGCGACACCCACT
CCTCCACCTTTGACGCTGGGGCTGGCATTGCCCTCAACGACCACTTTGTCAAGCTCATTTCCTG
GTATGTGGCTGGGGCCAGAGACTGGCTCTTAAAAAGTGCAGGGTCTGGCGCCCTCTGGTGGCTG
GCTCAGAAAAAGGGCCCTGACAACTCTTTACATCTTCTAGGTATGACAACGAGTTCGGATATAG
CAATAGAGTGGTCGATCTGATGGCTCATATGGCTAGCAAAGAGGGAAGCGGAGCTACTAACTTC
AGCCTGCTGAAGCAGGCTGGAGACGTGGAGGAGAACCCTGGACCTATGGATTGGACCTGGATCC
TGTTTCTGGTGGCCGCTGCCACAAGAGTGCACAGCAATTGGGTCAACGTGATCAGCGACCTGAA
GAAGATCGAGGACCTGATCCAGAGCATGCACATCGACGCCACACTGTACACCGAGTCCGATGTG
CACCCTAGCTGCAAAGTGACCGCCATGAAGTGCTTTCTGCTGGAACTGCAAGTGATCAGCCTGG
AAAGCGGCGACGCCAGCATCCACGATACCGTGGAAAACCTGATCATCCTGGCCAACAACAGCCT
GAGCAGCAACGGCAATGTGACCGAGAGCGGCTGCAAAGAGTGCGAGGAACTGGAAGAGAAGAAC
ATCAAAGAGTTCCTCCAGAGCTTCGTCCACATCGTGCAGATGTTCATCAACACCAGCTCTGGCG
GAGGAAGCGGAGGCGGAGGATCTGGTGGTGGTGGATCTGGCGGCGGTGGTAGTGGCGGAGGTTC
TCTGCAAATCACCTGTCCTCCACCTATGAGCGTGGAACACGCCGACATCTGGGTCAAGAGCTAC
AGCCTGTACAGCAGAGAGCGGTACATCTGCAACAGCGGCTTCAAGAGAAAGGCCGGCACAAGCA
GCCTGACCGAGTGTGTGCTGAACAAGGCCACAAACGTGGCCCACTGGACCACACCTAGCCTGAA
GTGCATCAGAGATCCCGCTCTGGTTCATCAGAGGCCTGCCCCTCCATCTACAGTGACAACAGCT
GGCGTGACCCCTCAGCCTGAGTCTCTGTCTCCATCTGGAAAAGAGCCTGCCGCCAGCTCTCCCA
GCTCTAACAATACTGCTGCCACCACAGCCGCTATCGTGCCTGGATCTCAGCTGATGCCTAGCAA
GAGCCCTAGCACCGGCACAACAGAGATCAGCTCTCACGAGAGCAGCCACGGAACACCTTCTCAG
ACCACCGCCAAGAATTGGGAGCTGACAGCCTCTGCCTCTCATCAGCCACCTGGCGTGTACCCAC
AGGGCCACTCTGATACAACAGTGGCCATCAGCACCAGCACCGTTCTGCTGTGTGGCCTGTCTGC
TGTTAGCCTGCTGGCCTGCTACCTGAAGTCTAGACAGACACCTCCTCTGGCCAGCGTGGAAATG
GAAGCCATGGAAGCTCTGCCTGTCACATGGGGCACCAGCAGCAGAGATGAGGACCTCGAGAATT
GCAGCCACCACCTGTAGGCGGCCGCGTCGAGTCTAGAGGGCCCGTTTAAACCCGCTGATCAGCC
TCGACTGTGCCTTCTAGTTGCCAGCCATCTGTTGTTTGCCCCTCCCCCGTGCCTTCCTTGACCC
TGGAAGGTGCCACTCCCACTGTCCTTTCCTAATAAAATGAGGAAATTGCATCGCATTGTCTGAG
TAGGTGTCATTCTATTCTGGGGGGTGGGGTGGGGCAGGACAGCAAGGGGGAGGATTGGGAAGAC
AATAGCAGGCATGCTGGGGATGCGGTGGGCTCTATGGATTTGGCTACAGCAACAGGGTGGTGGA
CCTCATGGCCCACATGGCCTCCAAGGAGTAAGACCCCTGGACCACCAGCCCCAGCAAGAGCACA
AGAGGAAGAGAGAGACCCTCACTGCTGGGGAGTCCCTGCCACACTCAGTCCCCCACCACACTGA
ATCTCCCCTCCTCACAGTTGCCATGTAGACCCCTTGAAGAGGGGAGGGGCCTAGGGAGCCGCAC
CTTGTCATGTACCATCAATAAAGTACCCTGTGCTCAACCAGTTACTTGTCCTGTCTTATTCTAG
GGTCTGGGGCAGAGGGGAGGGAAGCTGGGCTTGTGTCAAGGTGAGACATTCTTGCTGGGGAGGG
ACCTGGTATGTTCTCCTCAGACTGAGGGTAGGGCCTCCAAACAGCCTTGCTTGCTTCGAGAACC
ATTTGCTTCCCGCTCAGACGTCTTGAGTGCTACAGGAAGCTGGCACCACTACTTCAGAGAACAA
GGCCTTTTCCTCTCCTCGCTCCAGT
exemplary donor template for insertion at GAPDH locus
SEQ ID NO: 46
GGCTTTCCCATAATTTCCTTTCAAGGTGGGGAGGGAGGTAGAGGGGTGATGTGGGGAGTACGCT
GCAGGGCCTCACTCCTTTTGCAGACCACAGTCCATGCCATCACTGCCACCCAGAAGACTGTGGA
TGGCCCCTCCGGGAAACTGTGGCGTGATGGCCGCGGGGCTCTCCAGAACATCATCCCTGCCTCT
ACTGGCGCTGCCAAGGCTGTGGGCAAGGTCATCCCTGAGCTGAACGGGAAGCTCACTGGCATGG
CCTTCCGTGTCCCCACTGCCAACGTGTCAGTGGTGGACCTGACCTGCCGTCTAGAAAAACCTGC
CAAATATGATGACATCAAGAAGGTGGTGAAGCAGGCGTCGGAGGGCCCCCTCAAGGGCATCCTG
GGCTACACTGAGCACCAGGTGGTCTCCTCTGACTTCAACAGCGACACCCACTCCTCCACCTTTG
ACGCTGGGGCTGGCATTGCCCTCAACGACCACTTTGTCAAGCTCATCTCTTGGTACGACAATGA
GTTCGGATATAGCAATAGAGTGGTCGATCTGATGGCTCATATGGCTAGCAAAGAGGGAAGCGGA
GCTACTAACTTCAGCCTGCTGAAGCAGGCTGGAGACGTGGAGGAGAACCCTGGACCTATGGTGA
GCAAGGGCGAGGAGCTGTTCACCGGGGTGGTGCCCATCCTGGTCGAGCTGGACGGCGACGTAAA
CGGCCACAAGTTCAGCGTGTCCGGCGAGGGCGAGGGCGATGCCACCTACGGCAAGCTGACCCTG
AAGTTCATCTGCACCACCGGCAAGCTGCCCGTGCCCTGGCCCACCCTCGTGACCACCCTGACCT
ACGGCGTGCAGTGCTTCAGCCGCTACCCCGACCACATGAAGCAGCACGACTTCTTCAAGTCCGC
CATGCCCGAAGGCTACGTCCAGGAGCGCACCATCTTCTTCAAGGACGACGGCAACTACAAGACC
CGCGCCGAGGTGAAGTTCGAGGGCGACACCCTGGTGAACCGCATCGAGCTGAAGGGCATCGACT
TCAAGGAGGACGGCAACATCCTGGGGCACAAGCTGGAGTACAACTACAACAGCCACAACGTCTA
TATCATGGCCGACAAGCAGAAGAACGGCATCAAGGTGAACTTCAAGATCCGCCACAACATCGAG
GACGGCAGCGTGCAGCTCGCCGACCACTACCAGCAGAACACCCCCATCGGCGACGGCCCCGTGC
TGCTGCCCGACAACCACTACCTGAGCACCCAGTCCGCCCTGAGCAAAGACCCCAACGAGAAGCG
CGATCACATGGTCCTGCTGGAGTTCGTGACCGCCGCCGGGATCACTCTCGGCATGGACGAGCTG
TACAAGTGAGCGGCCGCGTCGAGTCTAGAGGGCCCGTTTAAACCCGCTGATCAGCCTCGACTGT
GCCTTCTAGTTGCCAGCCATCTGTTGTTTGCCCCTCCCCCGTGCCTTCCTTGACCCTGGAAGGT
GCCACTCCCACTGTCCTTTCCTAATAAAATGAGGAAATTGCATCGCATTGTCTGAGTAGGTGTC
ATTCTATTCTGGGGGGTGGGGTGGGGCAGGACAGCAAGGGGGAGGATTGGGAAGACAATAGCAG
GCATGCTGGGGATGCGGTGGGCTCTATGGAGACTGGCTCTTAAAAAGTGCAGGGTCTGGCGCCC
TCTGGTGGCTGGCTCAGAAAAAGGGCCCTGACAACTCTTTTCATCTTCTAGGTATGACAACGAA
TTTGGCTACAGCAACAGGGTGGTGGACCTCATGGCCCACATGGCCTCCAAGGAGTAAGACCCCT
GGACCACCAGCCCCAGCAAGAGCACAAGAGGAAGAGAGAGACCCTCACTGCTGGGGAGTCCCTG
CCACACTCAGTCCCCCACCACACTGAATCTCCCCTCCTCACAGTTGCCATGTAGACCCCTTGAA
GAGGGGAGGGGCCTAGGGAGCCGCACCTTGTCATGTACCATCAATAAAGTACCCTGTGCTCAAC
CAGTTACTTGTCCTGTCTTATTCTAGGGTCTGGGGCAGAGGGGAGGGAAGCTGGGCTTGTGTCA
AGGTGAGACATTCTTGCTGGGGAGGGACCTGGTATGTTCTCCTCAGACTGAGGGTAGGGCCTCC
AAACAGCCTTGCTTGCT
exemplary donor template for insertion at TBP locus
SEQ ID NO: 47
GCAGACTTCCATTTACAGTGAGGAGGTGAGCATTGCATTGAACAAAAGATGGCGTTTTCACTTG
GAATTAGTTATCTGAAGCTTTAGGATTCCTCAGCAATATGATTATGAGACAAGAAAGGAAGATT
CAGAAATGAGTCTAGTTGAAGGCAGCAATTCAGAGAAGAAGATTCAGTTGTTATCATTGCCGTC
CTGCTTGGTTTATGGCCTGGTTCAGGACCAAGGAGAGAAGTGTGAATACATGCCTCTTGAGCTA
TAGAATGAGACGCTGGAGTCACTAAGATGATTTTTTAAAAGTATTGTTTTATAAACAAAAATAA
GATTGTGACAAGGGATTCCACTATTAATGTTTTCATGCCTGTGCCTTAATCTGACTGGGTATGG
TGAGAATTGTGCTTGCAGCTTTAAGGTAAGAATTTTACCATCTTAATATGTTAAGAAGTGCCAT
TTCAGTCTCTCATCTCTACTCCAACTTGTCTTCTTAGGTGCTAAAGTCAGAGCCGAAATCTACG
AGGCCTTCGAGAACATCTACCCCATCCTGAAGGGCTTCAGAAAGACCACCGGAAGCGGAGCTAC
TAACTTCAGCCTGCTGAAGCAGGCTGGAGACGTGGAGGAGAACCCTGGACCTATGGTGAGCAAG
GGCGAGGAGCTGTTCACCGGGGTGGTGCCCATCCTGGTCGAGCTGGACGGCGACGTAAACGGCC
ACAAGTTCAGCGTGTCCGGCGAGGGCGAGGGCGATGCCACCTACGGCAAGCTGACCCTGAAGTT
CATCTGCACCACCGGCAAGCTGCCCGTGCCCTGGCCCACCCTCGTGACCACCCTGACCTACGGC
GTGCAGTGCTTCAGCCGCTACCCCGACCACATGAAGCAGCACGACTTCTTCAAGTCCGCCATGC
CCGAAGGCTACGTCCAGGAGCGCACCATCTTCTTCAAGGACGACGGCAACTACAAGACCCGCGC
CGAGGTGAAGTTCGAGGGCGACACCCTGGTGAACCGCATCGAGCTGAAGGGCATCGACTTCAAG
GAGGACGGCAACATCCTGGGGCACAAGCTGGAGTACAACTACAACAGCCACAACGTCTATATCA
TGGCCGACAAGCAGAAGAACGGCATCAAGGTGAACTTCAAGATCCGCCACAACATCGAGGACGG
CAGCGTGCAGCTCGCCGACCACTACCAGCAGAACACCCCCATCGGCGACGGCCCCGTGCTGCTG
CCCGACAACCACTACCTGAGCACCCAGTCCGCCCTGAGCAAAGACCCCAACGAGAAGCGCGATC
ACATGGTCCTGCTGGAGTTCGTGACCGCCGCCGGGATCACTCTCGGCATGGACGAGCTGTACAA
GTGAGCGGCCGCGTCGAGTCTAGAGGGCCCGTTTAAACCCGCTGATCAGCCTCGACTGTGCCTT
CTAGTTGCCAGCCATCTGTTGTTTGCCCCTCCCCCGTGCCTTCCTTGACCCTGGAAGGTGCCAC
TCCCACTGTCCTTTCCTAATAAAATGAGGAAATTGCATCGCATTGTCTGAGTAGGTGTCATTCT
ATTCTGGGGGGTGGGGTGGGGCAGGACAGCAAGGGGGAGGATTGGGAAGACAATAGCAGGCATG
CTGGGGATGCGGTGGGCTCTATGGCAGAAATTTATGAAGCATTTGAAAACATCTACCCTATTCT
AAAGGGATTCAGGAAGACGACGTAATGGCTCTCATGTACCCTTGCCTCCCCCACCCCCTTCTTT
TTTTTTTTTTAAACAAATCAGTTTGTTTTGGTACCTTTAAATGGTGGTGTTGTGAGAAGATGGA
TGTTGAGTTGCAGGGTGTGGCACCAGGTGATGCCCTTCTGTAAGTGCCCACCGCGGGATGCCGG
GAAGGGGCATTATTTGTGCACTGAGAACACCGCGCAGCGTGACTGTGAGTTGCTCATACCGTGC
TGCTATCTGGGCAGCGCTGCCCATTTATTTATATGTAGATTTTAAACACTGCTGTTGACAAGIT
GGTTTGAGGGAGAAAACTTTAAGTGTTAAAGCCACCTCTATAATTGATTGGACTTTTTAATTTT
AATGTTTTTCCCCATGAACCACAGTTTTTATATTTCTACCAGAAAAGTAAAAATCTTTTTTAAA
AGTGTTGTTTTT
exemplary donor template for insertion at TBP locus
SEQ ID NO: 49
CTGACCACAGCTCTGCAAGCAGACTTCCATTTACAGTGAGGAGGTGAGCATTGCATTGAACAAA
AGATGGCGTTTTCACTTGGAATTAGTTATCTGAAGCTTTAGGATTCCTCAGCAATATGATTATG
AGACAAGAAAGGAAGATTCAGAAATGAGTCTAGTTGAAGGCAGCAATTCAGAGAAGAAGATTCA
GTTGTTATCATTGCCGTCCTGCTTGGTTTATGGCCTGGTTCAGGACCAAGGAGAGAAGTGTGAA
TACATGCCTCTTGAGCTATAGAATGAGACGCTGGAGTCACTAAGATGATTTTTTAAAAGTATTG
TTTTATAAACAAAAATAAGATTGTGACAAGGGATTCCACTATTAATGTTTTCATGCCTGTGCCT
TAATCTGACTGGGTATGGTGAGAATTGTGCTTGCAGCTTTAAGGTAAGAATTTTACCATCTTAA
TATGTTAAGAAGTGCCATTTCAGTCTCTCATCTCTACTCCAACTTGTCTTCTTAGGGGCTAAAG
TGCGGGCCGAGATCTACGAGGCCTTCGAGAATATCTACCCCATCCTGAAGGGCTTCAGAAAGAC
CACCGGAAGCGGAGCTACTAACTTCAGCCTGCTGAAGCAGGCTGGAGACGTGGAGGAGAACCCT
GGACCTATGGTGAGCAAGGGCGAGGAGCTGTTCACCGGGGTGGTGCCCATCCTGGTCGAGCTGG
ACGGCGACGTAAACGGCCACAAGTTCAGCGTGTCCGGCGAGGGCGAGGGCGATGCCACCTACGG
CAAGCTGACCCTGAAGTTCATCTGCACCACCGGCAAGCTGCCCGTGCCCTGGCCCACCCTCGTG
ACCACCCTGACCTACGGCGTGCAGTGCTTCAGCCGCTACCCCGACCACATGAAGCAGCACGACT
TCTTCAAGTCCGCCATGCCCGAAGGCTACGTCCAGGAGCGCACCATCTTCTTCAAGGACGACGG
CAACTACAAGACCCGCGCCGAGGTGAAGTTCGAGGGCGACACCCTGGTGAACCGCATCGAGCTG
AAGGGCATCGACTTCAAGGAGGACGGCAACATCCTGGGGCACAAGCTGGAGTACAACTACAACA
GCCACAACGTCTATATCATGGCCGACAAGCAGAAGAACGGCATCAAGGTGAACTTCAAGATCCG
CCACAACATCGAGGACGGCAGCGTGCAGCTCGCCGACCACTACCAGCAGAACACCCCCATCGGC
GACGGCCCCGTGCTGCTGCCCGACAACCACTACCTGAGCACCCAGTCCGCCCTGAGCAAAGACC
CCAACGAGAAGCGCGATCACATGGTCCTGCTGGAGTTCGTGACCGCCGCCGGGATCACTCTCGG
CATGGACGAGCTGTACAAGTGAGCGGCCGCGTCGAGTCTAGAGGGCCCGTTTAAACCCGCTGAT
CAGCCTCGACTGTGCCTTCTAGTTGCCAGCCATCTGTTGTTTGCCCCTCCCCCGTGCCTTCCTT
GACCCTGGAAGGTGCCACTCCCACTGTCCTTTCCTAATAAAATGAGGAAATTGCATCGCATTGT
CTGAGTAGGTGTCATTCTATTCTGGGGGGTGGGGTGGGGCAGGACAGCAAGGGGGAGGATTGGG
AAGACAATAGCAGGCATGCTGGGGATGCGGTGGGCTCTATGGTAGGTGCTAAAGTCAGAGCAGA
AATTTATGAAGCATTTGAAAACATCTACCCTATTCTAAAGGGATTCAGGAAGACGACGTAATGG
CTCTCATGTACCCTTGCCTCCCCCACCCCCTTCTTTTTTTTTTTTTAAACAAATCAGTTTGTTT
TGGTACCTTTAAATGGTGGTGTTGTGAGAAGATGGATGTTGAGTTGCAGGGTGTGGCACCAGGT
GATGCCCTTCTGTAAGTGCCCACCGCGGGATGCCGGGAAGGGGCATTATTTGTGCACTGAGAAC
ACCGCGCAGCGTGACTGTGAGTTGCTCATACCGTGCTGCTATCTGGGCAGCGCTGCCCATTTAT
TTATATGTAGATTTTAAACACTGCTGTTGACAAGTTGGTTTGAGGGAGAAAACTTTAAGTGTTA
AAGCCACCTCTATAATTGATTGGACTTTTTAATTTTAATGTTTTTCCCCATGAACCACAGTTTT
TATATTTCTACCAGAAAAGTAAAAATCTTT
exemplary donor template for insertion at TBP locus
SEQ ID NO: 50
ACAAAAGATGGCGTTTTCACTTGGAATTAGTTATCTGAAGCTTTAGGATTCCTCAGCAATATGA
TTATGAGACAAGAAAGGAAGATTCAGAAATGAGTCTAGTTGAAGGCAGCAATTCAGAGAAGAAG
ATTCAGTTGTTATCATTGCCGTCCTGCTTGGTTTATGGCCTGGTTCAGGACCAAGGAGAGAAGT
GTGAATACATGCCTCTTGAGCTATAGAATGAGACGCTGGAGTCACTAAGATGATTTTTTAAAAG
TATTGTTTTATAAACAAAAATAAGATTGIGACAAGGGATTCCACTATTAATGTTTTCATGCCTG
TGCCTTAATCTGACTGGGTATGGTGAGAATTGTGCTTGCAGCTTTAAGGTAAGAATTTTACCAT
CTTAATATGTTAAGAAGTGCCATTTCAGTCTCTCATCTCTACTCCAACTTGTCTTCTTAGGTGC
TAAAGTCAGAGCAGAAATTTATGAAGCATTCGAGAACATCTACCCTATTCTAAAGGGATTCAGG
AAGACGACGGGAAGCGGAGCTACTAACTTCAGCCTGCTGAAGCAGGCTGGAGACGTGGAGGAGA
ACCCTGGACCTATGGTGAGCAAGGGCGAGGAGCTGTTCACCGGGGTGGTGCCCATCCTGGTCGA
GCTGGACGGCGACGTAAACGGCCACAAGTTCAGCGTGTCCGGCGAGGGCGAGGGCGATGCCACC
TACGGCAAGCTGACCCTGAAGTTCATCTGCACCACCGGCAAGCTGCCCGTGCCCTGGCCCACCC
TCGTGACCACCCTGACCTACGGCGTGCAGTGCTTCAGCCGCTACCCCGACCACATGAAGCAGCA
CGACTTCTTCAAGTCCGCCATGCCCGAAGGCTACGTCCAGGAGCGCACCATCTTCTTCAAGGAC
GACGGCAACTACAAGACCCGCGCCGAGGTGAAGTTCGAGGGCGACACCCTGGTGAACCGCATCG
AGCTGAAGGGCATCGACTTCAAGGAGGACGGCAACATCCTGGGGCACAAGCTGGAGTACAACTA
CAACAGCCACAACGTCTATATCATGGCCGACAAGCAGAAGAACGGCATCAAGGTGAACTTCAAG
ATCCGCCACAACATCGAGGACGGCAGCGTGCAGCTCGCCGACCACTACCAGCAGAACACCCCCA
TCGGCGACGGCCCCGTGCTGCTGCCCGACAACCACTACCTGAGCACCCAGTCCGCCCTGAGCAA
AGACCCCAACGAGAAGCGCGATCACATGGTCCTGCTGGAGTTCGTGACCGCCGCCGGGATCACT
CTCGGCATGGACGAGCTGTACAAGTGAGCGGCCGCGTCGAGTCTAGAGGGCCCGTTTAAACCCG
CTGATCAGCCTCGACTGTGCCTTCTAGTTGCCAGCCATCTGTTGTTTGCCCCTCCCCCGTGCCT
TCCTTGACCCTGGAAGGTGCCACTCCCACTGTCCTTTCCTAATAAAATGAGGAAATTGCATCGC
ATTGTCTGAGTAGGTGTCATTCTATTCTGGGGGGTGGGGTGGGGCAGGACAGCAAGGGGGAGGA
TTGGGAAGACAATAGCAGGCATGCTGGGGATGCGGTGGGCTCTATGGAAGGGATTCAGGAAGAC
GACGTAATGGCTCTCATGTACCCTTGCCTCCCCCACCCCCTTCTTTTTTTTTTTTTAAACAAAT
CAGTTTGTTTTGGTACCTTTAAATGGTGGTGTTGTGAGAAGATGGATGTTGAGTTGCAGGGTGT
GGCACCAGGTGATGCCCTTCTGTAAGTGCCCACCGCGGGATGCCGGGAAGGGGCATTATTTGTG
CACTGAGAACACCGCGCAGCGTGACTGTGAGTTGCTCATACCGTGCTGCTATCTGGGCAGCGCT
GCCCATTTATTTATATGTAGATTTTAAACACTGCTGTTGACAAGTTGGTTTGAGGGAGAAAACT
TTAAGTGTTAAAGCCACCTCTATAATTGATTGGACTTTTTAATTTTAATGTTTTTCCCCATGAA
CCACAGTTTTTATATTTCTACCAGAAAAGTAAAAATCTTTTTTAAAAGTGTTGTTTTTCTAATT
TATAACTCCTAGGGGTTATTTCTGTGCCAGACACA
exemplary donor template for insertion at G6PD locus
SEQ ID NO: 51
GGCCCGGGGGACTCCACATGGTGGCAGGCAGTGGCATCAGCAAGACACTCTCTCCCTCACAGAA
CGTGAAGCTCCCTGACGCCTATGAGCGCCTCATCCTGGACGTCTTCTGCGGGAGCCAGATGCAC
TTCGTGCGCAGGTGAGGCCCAGCTGCCGGCCCCTGCATACCTGTGGGCTATGGGGTGGCCTTTG
CCCTCCCTCCCTGTGTGCCACCGGCCTCCCAAGCCATACCATGTCCCCTCAGCGACGAGCTCCG
TGAGGCCTGGCGTATTTTCACCCCACTGCTGCACCAGATTGAGCTGGAGAAGCCCAAGCCCATC
CCCTATATTTATGGCAGGTGAGGAAAGGGTGGGGGCTGGGGACAGAGCCCAGCGGGCAGGGGCG
GGGTGAGGGTGGAGCTACCTCATGCCTCTCCTCCACCCGTCACTCTCCAGCCGAGGCCCCACGG
AGGCAGACGAGCTGATGAAGAGAGTGGGCTTCCAGTACGAGGGAACCTACAAATGGGTCAACCC
TCACAAGCTGGGAAGCGGAGCTACTAACTTCAGCCTGCTGAAGCAGGCTGGAGACGTGGAGGAG
AACCCTGGACCTATGGTGAGCAAGGGCGAGGAGCTGTTCACCGGGGTGGTGCCCATCCTGGTCG
AGCTGGACGGCGACGTAAACGGCCACAAGTTCAGCGTGTCCGGCGAGGGCGAGGGCGATGCCAC
CTACGGCAAGCTGACCCTGAAGTTCATCTGCACCACCGGCAAGCTGCCCGTGCCCTGGCCCACC
CTCGTGACCACCCTGACCTACGGCGTGCAGTGCTTCAGCCGCTACCCCGACCACATGAAGCAGC
ACGACTTCTTCAAGTCCGCCATGCCCGAAGGCTACGTCCAGGAGCGCACCATCTTCTTCAAGGA
CGACGGCAACTACAAGACCCGCGCCGAGGTGAAGTTCGAGGGCGACACCCTGGTGAACCGCATC
GAGCTGAAGGGCATCGACTTCAAGGAGGACGGCAACATCCTGGGGCACAAGCTGGAGTACAACT
ACAACAGCCACAACGTCTATATCATGGCCGACAAGCAGAAGAACGGCATCAAGGTGAACTTCAA
GATCCGCCACAACATCGAGGACGGCAGCGTGCAGCTCGCCGACCACTACCAGCAGAACACCCCC
ATCGGCGACGGCCCCGTGCTGCTGCCCGACAACCACTACCTGAGCACCCAGTCCGCCCTGAGCA
AAGACCCCAACGAGAAGCGCGATCACATGGTCCTGCTGGAGTTCGTGACCGCCGCCGGGATCAC
TCTCGGCATGGACGAGCTGTACAAGTGAGCGGCCGCGTCGAGTCTAGAGGGCCCGTTTAAACCC
GCTGATCAGCCTCGACTGTGCCTTCTAGTTGCCAGCCATCTGTTGTTTGCCCCTCCCCCGTGCC
TTCCTTGACCCTGGAAGGTGCCACTCCCACTGTCCTTTCCTAATAAAATGAGGAAATTGCATCG
CATTGTCTGAGTAGGTGTCATTCTATTCTGGGGGGTGGGGTGGGGCAGGACAGCAAGGGGGAGG
ATTGGGAAGACAATAGCAGGCATGCTGGGGATGCGGTGGGCTCTATGGGTGGGTGAACCCCCAC
AAGCTCTGAGCCCTGGGCACCCACCTCCACCCCCGCCACGGCCACCCTCCTTCCCGCCGCCCGA
CCCCGAGTCGGGAGGACTCCGGGACCATTGACCTCAGCTGCACATTCCTGGCCCCGGGCTCTGG
CCACCCTGGCCCGCCCCTCGCTGCTGCTACTACCCGAGCCCAGCTACATTCCTCAGCTGCCAAG
CACTCGAGACCATCCTGGCCCCTCCAGACCCTGCCTGAGCCCAGGAGCTGAGTCACCTCCTCCA
CTCACTCCAGCCCAACAGAAGGAAGGAGGAGGGCGCCCATTCGTCTGTCCCAGAGCTTATTGGC
CACTGGGTCTCACTCCTGAGTGGGGCCAGGGTGGGAGGGAGGGACGAGGGGGAGGAAAGGGGCG
AGCACCCACGTGAGAGAATCTGCCTGTGGCCTTGCCCGCCAGCCTCAGTGCCACTTGACATTCC
TTGTCACCAGCAACATCTCGAGCCCCCTGGATGTCC
exemplary donor template for insertion at E2F4 locus
SEQ ID NO: 52
CCAGGGGGCTGTAGTGGGGCCAGGCTGGACCTCTGTGCCCTGAGCATGGCTTTCTTGTTTTTCA
GTTTTGGAACTCCCCAAAGAGCTGTCAGAAATCTTTGATCCCACACGAGGTAGGCTGCTGCATT
CCTCCCTGAGGCTAGGGGTAAGGGACACAGCTCATTGGGTCCTATGGCTGTTTTCTTGCCCTTT
TGAGGACCTTGTTGTGGCGCTTATGGTAACTGGGGCAAAGGGTGAAGTTCCTGATGGGCAGGTG
GGGTTCCCTTTCCTGGGCTTTGGTGGGTGGAGAGGTGGGAGCTGGAATGTTAGTAACTGAGCTC
CCTCCATTCCCAGAGTGCATGAGCTCGGAGCTGCTGGAGGAGTTGATGTCCTCAGAAGGTGGGT
GGCCCTGGAAGGTGGGAGTGGGTGTGGGCAGGGGTTGGGCTGCTGCTAGGGGAGCCCTGGCCCA
GGGCCTGAGACTAGTGCTCTCTGCAGTGTTCGCCCCTCTGCTGAGACTTTCTCCTCCTCCTGGC
GACCACGACTACATCTACAACCTGGACGAGAGCGAGGGCGTGTGCGACCTGTTTGATGTGCCCG
TGCTGAACCTGGGAAGCGGAGCTACTAACTTCAGCCTGCTGAAGCAGGCTGGAGACGTGGAGGA
GAACCCTGGACCTATGGTGAGCAAGGGCGAGGAGCTGTTCACCGGGGTGGTGCCCATCCTGGTC
GAGCTGGACGGCGACGTAAACGGCCACAAGTTCAGCGTGTCCGGCGAGGGCGAGGGCGATGCCA
CCTACGGCAAGCTGACCCTGAAGTTCATCTGCACCACCGGCAAGCTGCCCGTGCCCTGGCCCAC
CCTCGTGACCACCCTGACCTACGGCGTGCAGTGCTTCAGCCGCTACCCCGACCACATGAAGCAG
CACGACTTCTTCAAGTCCGCCATGCCCGAAGGCTACGTCCAGGAGCGCACCATCTTCTTCAAGG
ACGACGGCAACTACAAGACCCGCGCCGAGGTGAAGTTCGAGGGCGACACCCTGGTGAACCGCAT
CGAGCTGAAGGGCATCGACTTCAAGGAGGACGGCAACATCCTGGGGCACAAGCTGGAGTACAAC
TACAACAGCCACAACGTCTATATCATGGCCGACAAGCAGAAGAACGGCATCAAGGTGAACTTCA
AGATCCGCCACAACATCGAGGACGGCAGCGTGCAGCTCGCCGACCACTACCAGCAGAACACCCC
CATCGGCGACGGCCCCGTGCTGCTGCCCGACAACCACTACCTGAGCACCCAGTCCGCCCTGAGC
AAAGACCCCAACGAGAAGCGCGATCACATGGTCCTGCTGGAGTTCGTGACCGCCGCCGGGATCA
CTCTCGGCATGGACGAGCTGTACAAGTGAGCGGCCGCGTCGAGTCTAGAGGGCCCGTTTAAACC
CGCTGATCAGCCTCGACTGTGCCTTCTAGTTGCCAGCCATCTGTTGTTTGCCCCTCCCCCGTGC
CTTCCTTGACCCTGGAAGGTGCCACTCCCACTGTCCTTTCCTAATAAAATGAGGAAATTGCATC
GCATTGTCTGAGTAGGTGTCATTCTATTCTGGGGGGTGGGGTGGGGCAGGACAGCAAGGGGGAG
GATTGGGAAGACAATAGCAGGCATGCTGGGGATGCGGTGGGCTCTATGGCCACCCCCGGGAGAC
CACGATTATATCTACAACCTGGACGAGAGTGAAGGTGTCTGTGACCTCTTTGATGTGCCTGTTC
TCAACCTCTGACTGACAGGGACATGCCCTGTGTGGCTGGGACCCAGACTGTCTGACCTGGGGGT
TGCCTGGGGACCTCTCCCACCCGACCCCTACAGAGCTTGAGAGCCACAGACGCCTGGCTTCTCC
GGCCTCCCCTCACCGCACAGTTCTGGCCACAGCTCCCGCTCCTGTGCTGGCACTTCTGTGCTCG
CAGAGCAGGGGAACAGGACTCAGCCCCCATCACCGTGGAGCCAAAGTGTTTGCTTCTCCCTTTC
TGCGGCCTTCGCCAGCCCAGGCTCGGCTGCCACCCAGTGGCACAGAACCGAGGAGCTGCCATTA
CCCCCCATAGGGGGCAGTGTCTTGTTCCTGCCAGCCTCAGTGTCTTGCTTCTGCCAGCTCCTTC
CCCTAGGAGGGAAGGGTGGGGTGGAACTGGGCACATG
exemplary donor template for insertion at E2F4 locus
SEQ ID NO: 53
CCAGGCTGGACCTCTGTGCCCTGAGCATGGCTTTCTTGTTTTTCAGTTTTGGAACTCCCCAAAG
AGCTGTCAGAAATCTTTGATCCCACACGAGGTAGGCTGCTGCATTCCTCCCTGAGGCTAGGGGT
AAGGGACACAGCTCATTGGGTCCTATGGCTGTTTTCTTGCCCTTTTGAGGACCTTGTTGTGGCG
CTTATGGTAACTGGGGCAAAGGGTGAAGTTCCTGATGGGCAGGTGGGGTTCCCTTTCCTGGGCT
TTGGTGGGTGGAGAGGTGGGAGCTGGAATGTTAGTAACTGAGCTCCCTCCATTCCCAGAGTGCA
TGAGCTCGGAGCTGCTGGAGGAGTTGATGTCCTCAGAAGGTGGGTGGCCCTGGAAGGTGGGAGT
GGGTGTGGGCAGGGGTTGGGCTGCTGCTAGGGGAGCCCTGGCCCAGGGCCTGAGACTAGTGCTC
TCTGCAGTGTTTGCCCCTCTGCTTCGTCTTAGTCCTCCTCCGGGCGACCACGACTACATCTACA
ACCTGGACGAGAGCGAGGGCGTGTGCGACCTGTTTGATGTGCCCGTGCTGAACCTGGGAAGCGG
AGCTACTAACTTCAGCCTGCTGAAGCAGGCTGGAGACGTGGAGGAGAACCCTGGACCTATGGTG
AGCAAGGGCGAGGAGCTGTTCACCGGGGTGGTGCCCATCCTGGTCGAGCTGGACGGCGACGTAA
ACGGCCACAAGTTCAGCGTGTCCGGCGAGGGCGAGGGCGATGCCACCTACGGCAAGCTGACCCT
GAAGTTCATCTGCACCACCGGCAAGCTGCCCGTGCCCTGGCCCACCCTCGTGACCACCCTGACC
TACGGCGTGCAGTGCTTCAGCCGCTACCCCGACCACATGAAGCAGCACGACTTCTTCAAGTCCG
CCATGCCCGAAGGCTACGTCCAGGAGCGCACCATCTTCTTCAAGGACGACGGCAACTACAAGAC
CCGCGCCGAGGTGAAGTTCGAGGGCGACACCCTGGTGAACCGCATCGAGCTGAAGGGCATCGAC
TTCAAGGAGGACGGCAACATCCTGGGGCACAAGCTGGAGTACAACTACAACAGCCACAACGTCT
ATATCATGGCCGACAAGCAGAAGAACGGCATCAAGGTGAACTTCAAGATCCGCCACAACATCGA
GGACGGCAGCGTGCAGCTCGCCGACCACTACCAGCAGAACACCCCCATCGGCGACGGCCCCGTG
CTGCTGCCCGACAACCACTACCTGAGCACCCAGTCCGCCCTGAGCAAAGACCCCAACGAGAAGC
GCGATCACATGGTCCTGCTGGAGTTCGTGACCGCCGCCGGGATCACTCTCGGCATGGACGAGCT
GTACAAGTGAGCGGCCGCGTCGAGTCTAGAGGGCCCGTTTAAACCCGCTGATCAGCCTCGACTG
TGCCTTCTAGTTGCCAGCCATCTGTTGTTTGCCCCTCCCCCGTGCCTTCCTTGACCCTGGAAGG
TGCCACTCCCACTGTCCTTTCCTAATAAAATGAGGAAATTGCATCGCATTGTCTGAGTAGGTGT
CATTCTATTCTGGGGGGTGGGGTGGGGCAGGACAGCAAGGGGGAGGATTGGGAAGACAATAGCA
GGCATGCTGGGGATGCGGTGGGCTCTATGGATTATATCTACAACCTGGACGAGAGTGAAGGTGT
CTGTGACCTCTTTGATGTGCCTGTTCTCAACCTCTGACTGACAGGGACATGCCCTGTGTGGCTG
GGACCCAGACTGTCTGACCTGGGGGTTGCCTGGGGACCTCTCCCACCCGACCCCTACAGAGCTT
GAGAGCCACAGACGCCTGGCTTCTCCGGCCTCCCCTCACCGCACAGTTCTGGCCACAGCTCCCG
CTCCTGTGCTGGCACTTCTGTGCTCGCAGAGCAGGGGAACAGGACTCAGCCCCCATCACCGTGG
AGCCAAAGTGTTTGCTTCTCCCTTTCTGCGGCCTTCGCCAGCCCAGGCTCGGCTGCCACCCAGT
GGCACAGAACCGAGGAGCTGCCATTACCCCCCATAGGGGGCAGTGTCTTGTTCCTGCCAGCCTC
AGTGTCTTGCTTCTGCCAGCTCCTTCCCCTAGGAGGGAAGGGTGGGGTGGAACTGGGCACATGC
CAGCACCACTTCTAGCTT
exemplary donor template for insertion at E2F4 locus
SEQ ID NO: 54
GTCAGAAATCTTTGATCCCACACGAGGTAGGCTGCTGCATTCCTCCCTGAGGCTAGGGGTAAGG
GACACAGCTCATTGGGTCCTATGGCTGTTTTCTTGCCCTTTTGAGGACCTTGTTGTGGCGCTTA
TGGTAACTGGGGCAAAGGGTGAAGTTCCTGATGGGCAGGTGGGGTTCCCTTTCCTGGGCTTTGG
TGGGTGGAGAGGTGGGAGCTGGAATGTTAGTAACTGAGCTCCCTCCATTCCCAGAGTGCATGAG
CTCGGAGCTGCTGGAGGAGTTGATGTCCTCAGAAGGTGGGTGGCCCTGGAAGGTGGGAGTGGGT
GTGGGCAGGGGTTGGGCTGCTGCTAGGGGAGCCCTGGCCCAGGGCCTGAGACTAGTGCTCTCTG
CAGTGTTTGCCCCTCTGCTTCGTCTTTCTCCACCCCCGGGAGACCACGATTATATCTACAACCT
GGACGAGAGTGAAGGTGTCTGTGACCTCTTCGACGTGCCCGTGCTCAACCTCGGAAGCGGAGCT
ACTAACTTCAGCCTGCTGAAGCAGGCTGGAGACGTGGAGGAGAACCCTGGACCTATGGTGAGCA
AGGGCGAGGAGCTGTTCACCGGGGTGGTGCCCATCCTGGTCGAGCTGGACGGCGACGTAAACGG
CCACAAGTTCAGCGTGTCCGGCGAGGGCGAGGGCGATGCCACCTACGGCAAGCTGACCCTGAAG
TTCATCTGCACCACCGGCAAGCTGCCCGTGCCCTGGCCCACCCTCGTGACCACCCTGACCTACG
GCGTGCAGTGCTTCAGCCGCTACCCCGACCACATGAAGCAGCACGACTTCTTCAAGTCCGCCAT
GCCCGAAGGCTACGTCCAGGAGCGCACCATCTTCTTCAAGGACGACGGCAACTACAAGACCCGC
GCCGAGGTGAAGTTCGAGGGCGACACCCTGGTGAACCGCATCGAGCTGAAGGGCATCGACTTCA
AGGAGGACGGCAACATCCTGGGGCACAAGCTGGAGTACAACTACAACAGCCACAACGTCTATAT
CATGGCCGACAAGCAGAAGAACGGCATCAAGGTGAACTTCAAGATCCGCCACAACATCGAGGAC
GGCAGCGTGCAGCTCGCCGACCACTACCAGCAGAACACCCCCATCGGCGACGGCCCCGTGCTGC
TGCCCGACAACCACTACCTGAGCACCCAGTCCGCCCTGAGCAAAGACCCCAACGAGAAGCGCGA
TCACATGGTCCTGCTGGAGTTCGTGACCGCCGCCGGGATCACTCTCGGCATGGACGAGCTGTAC
AAGTGAGCGGCCGCGTCGAGTCTAGAGGGCCCGTTTAAACCCGCTGATCAGCCTCGACTGTGCC
TTCTAGTTGCCAGCCATCTGTTGTTTGCCCCTCCCCCGTGCCTTCCTTGACCCTGGAAGGTGCC
ACTCCCACTGTCCTTTCCTAATAAAATGAGGAAATTGCATCGCATTGTCTGAGTAGGTGTCATT
CTATTCTGGGGGGTGGGGTGGGGCAGGACAGCAAGGGGGAGGATTGGGAAGACAATAGCAGGCA
TGCTGGGGATGCGGTGGGCTCTATGGTGACTGACAGGGACATGCCCTGTGTGGCTGGGACCCAG
ACTGTCTGACCTGGGGGTTGCCTGGGGACCTCTCCCACCCGACCCCTACAGAGCTTGAGAGCCA
CAGACGCCTGGCTTCTCCGGCCTCCCCTCACCGCACAGTTCTGGCCACAGCTCCCGCTCCTGTG
CTGGCACTTCTGTGCTCGCAGAGCAGGGGAACAGGACTCAGCCCCCATCACCGTGGAGCCAAAG
TGTTTGCTTCTCCCTTTCTGCGGCCTTCGCCAGCCCAGGCTCGGCTGCCACCCAGTGGCACAGA
ACCGAGGAGCTGCCATTACCCCCCATAGGGGGCAGTGTCTTGTTCCTGCCAGCCTCAGTGTCTT
GCTTCTGCCAGCTCCTTCCCCTAGGAGGGAAGGGTGGGGTGGAACTGGGCACATGCCAGCACCA
CTTCTAGCTTCCTTCGCTATCCCCCACCCCCTGACCCTCCAGCTCCTCCTGGCCCTCTCACGTG
CCCACTTCTGCTGG
exemplary donor template for insertion at KIF11 locus
SEQ ID NO: 55
AGAGCAGGGTTTCTTGACAGCAGTGCTATTGGCATTTTAAACTGGATAATTCTTTGTTGTGATG
GGCTTTCCTGTGGACTGTACTATGTTGGTACACAAGAAAAACAGTGTACTATGTGAATACTCAC
TCAAAGCCAGTAGCACTCCCTGATTGTAACACCAAAAAAGTCTCTCAGCATTGCCAAATGTCCC
CTGTGGCAGCAGAATCACTCCCTGATGAGAACCACTACCCTGGAGTAAAATCTATAACTATGTC
TTAGAAAATAACACAGAAAATTAATATTTCTTTCACTCTACTCCTTCCATTAGTGATCAAATAA
AGAAGGCATTTGGCGCTACTTGCCAAATTGTTGGCTCAAACTTGTGCTGAACCTTTTTTGGTTT
TCTACACTTAAGTTTTTTTGCCTATAACCCAGAGAACTTTGAAAATAGAGTGTAGTTAATGTGT
ATCTAATGTTACTTTGTATTGACTTAATTTACCGGCCTTTAATCCACAGCATAAGAAGTCCCAC
GGCAAGGACAAAGAGAACCGGGGCATCAACACACTGGAACGGTCCAAGGTCGAGGAAACAACCG
AGCACCTGGTCACCAAGAGCAGACTGCCTCTGAGAGCCCAGATCAACCTGGGAAGCGGAGCTAC
TAACTTCAGCCTGCTGAAGCAGGCTGGAGACGTGGAGGAGAACCCTGGACCTATGGTGAGCAAG
GGCGAGGAGCTGTTCACCGGGGTGGTGCCCATCCTGGTCGAGCTGGACGGCGACGTAAACGGCC
ACAAGTTCAGCGTGTCCGGCGAGGGCGAGGGCGATGCCACCTACGGCAAGCTGACCCTGAAGTT
CATCTGCACCACCGGCAAGCTGCCCGTGCCCTGGCCCACCCTCGTGACCACCCTGACCTACGGC
GTGCAGTGCTTCAGCCGCTACCCCGACCACATGAAGCAGCACGACTTCTTCAAGTCCGCCATGC
CCGAAGGCTACGTCCAGGAGCGCACCATCTTCTTCAAGGACGACGGCAACTACAAGACCCGCGC
CGAGGTGAAGTTCGAGGGCGACACCCTGGTGAACCGCATCGAGCTGAAGGGCATCGACTTCAAG
GAGGACGGCAACATCCTGGGGCACAAGCTGGAGTACAACTACAACAGCCACAACGTCTATATCA
TGGCCGACAAGCAGAAGAACGGCATCAAGGTGAACTTCAAGATCCGCCACAACATCGAGGACGG
CAGCGTGCAGCTCGCCGACCACTACCAGCAGAACACCCCCATCGGCGACGGCCCCGTGCTGCTG
CCCGACAACCACTACCTGAGCACCCAGTCCGCCCTGAGCAAAGACCCCAACGAGAAGCGCGATC
ACATGGTCCTGCTGGAGTTCGTGACCGCCGCCGGGATCACTCTCGGCATGGACGAGCTGTACAA
GTGAGCGGCCGCGTCGAGTCTAGAGGGCCCGTTTAAACCCGCTGATCAGCCTCGACTGTGCCTT
CTAGTTGCCAGCCATCTGTTGTTTGCCCCTCCCCCGTGCCTTCCTTGACCCTGGAAGGTGCCAC
TCCCACTGTCCTTTCCTAATAAAATGAGGAAATTGCATCGCATTGTCTGAGTAGGTGTCATTCT
ATTCTGGGGGGTGGGGTGGGGCAGGACAGCAAGGGGGAGGATTGGGAAGACAATAGCAGGCATG
CTGGGGATGCGGTGGGCTCTATGGAAAAAATCACATGGAAAAGACAAAGAAAACAGAGGCATTA
ACACACTGGAGAGGTCTAAAGTGGAAGAAACTACAGAGCACTTGGTTACAAAGAGCAGATTACC
TCTGCGAGCCCAGATCAACCTTTAATTCACTTGGGGGTTGGCAATTTTATTTTTAAAGAAAACT
TAAAAATAAAACCTGAAACCCCAGAACTTGAGCCTTGTGTATAGATTTTAAAAGAATATATATA
TCAGCCGGGCGCGGTGGCTCATGCCTGTAATCCCAGCACTTTGGGAGGCTGAGGCGGGTGGATT
GCTTGAGCCCAGGAGTTTGAGACCAGCCTGGCCAACGTGGCAAAACCTCGTCTCTGTTAAAAAT
TAGCCGGGCGTGGTGGCACACTCCTGTAATCCCAGCTACTGGGGAGGCTGAGGCACGAGAATCA
CTTGAACCCAGGAAGCGGGGTTGCAGTGAGCCAAAGGTACACCACTACACTCCAGCCTGGGCAA
CAGAGCAAGACT
exemplary donor template for insertion at KIF11 locus
SEQ ID NO: 56
TTCCTGTGGACTGTACTATGTTGGTACACAAGAAAAACAGTGTACTATGTGAATACTCACTCAA
AGCCAGTAGCACTCCCTGATTGTAACACCAAAAAAGTCTCTCAGCATTGCCAAATGTCCCCTGT
GGCAGCAGAATCACTCCCTGATGAGAACCACTACCCTGGAGTAAAATCTATAACTATGTCTTAG
AAAATAACACAGAAAATTAATATTTCTTTCACTCTACTCCTTCCATTAGTGATCAAATAAAGAA
GGCATTTGGCGCTACTTGCCAAATTGTTGGCTCAAACTTGTGCTGAACCTTTTTTGGTTTTCTA
CACTTAAGTTTTTTTGCCTATAACCCAGAGAACTTTGAAAATAGAGTGTAGTTAATGTGTATCT
AATGTTACTTTGTATTGACTTAATTTTCCCGCCTTAAATCCACAGCATAAAAAATCACATGGAA
AAGACAAAGAAAACAGAGGCATTAACACACTGGAGAGGTCTAAAGTGGAAGAAACAACCGAGCA
CCTGGTCACCAAGAGCAGACTGCCTCTGAGAGCCCAGATCAACCTGGGAAGCGGAGCTACTAAC
TTCAGCCTGCTGAAGCAGGCTGGAGACGTGGAGGAGAACCCTGGACCTATGGTGAGCAAGGGCG
AGGAGCTGTTCACCGGGGTGGTGCCCATCCTGGTCGAGCTGGACGGCGACGTAAACGGCCACAA
GTTCAGCGTGTCCGGCGAGGGCGAGGGCGATGCCACCTACGGCAAGCTGACCCTGAAGTTCATC
TGCACCACCGGCAAGCTGCCCGTGCCCTGGCCCACCCTCGTGACCACCCTGACCTACGGCGTGC
AGTGCTTCAGCCGCTACCCCGACCACATGAAGCAGCACGACTTCTTCAAGTCCGCCATGCCCGA
AGGCTACGTCCAGGAGCGCACCATCTTCTTCAAGGACGACGGCAACTACAAGACCCGCGCCGAG
GTGAAGTTCGAGGGCGACACCCTGGTGAACCGCATCGAGCTGAAGGGCATCGACTTCAAGGAGG
ACGGCAACATCCTGGGGCACAAGCTGGAGTACAACTACAACAGCCACAACGTCTATATCATGGC
CGACAAGCAGAAGAACGGCATCAAGGTGAACTTCAAGATCCGCCACAACATCGAGGACGGCAGC
GTGCAGCTCGCCGACCACTACCAGCAGAACACCCCCATCGGCGACGGCCCCGTGCTGCTGCCCG
ACAACCACTACCTGAGCACCCAGTCCGCCCTGAGCAAAGACCCCAACGAGAAGCGCGATCACAT
GGTCCTGCTGGAGTTCGTGACCGCCGCCGGGATCACTCTCGGCATGGACGAGCTGTACAAGTGA
GCGGCCGCGTCGAGTCTAGAGGGCCCGTTTAAACCCGCTGATCAGCCTCGACTGTGCCTTCTAG
TTGCCAGCCATCTGTTGTTTGCCCCTCCCCCGTGCCTTCCTTGACCCTGGAAGGTGCCACTCCC
ACTGTCCTTTCCTAATAAAATGAGGAAATTGCATCGCATTGTCTGAGTAGGTGTCATTCTATTC
TGGGGGGTGGGGTGGGGCAGGACAGCAAGGGGGAGGATTGGGAAGACAATAGCAGGCATGCTGG
GGATGCGGTGGGCTCTATGGAACTACAGAGCACTTGGCTACATAGAGCAGATTACCTCTGCGAG
CCCAGATCAACCTTTAATTCACTTGGGGGTTGGCAATTTTATTTTTAAAGAAAACTTAAAAATA
AAACCTGAAACCCCAGAACTTGAGCCTTGTGTATAGATTTTAAAAGAATATATATATCAGCCGG
GCGCGGTGGCTCATGCCTGTAATCCCAGCACTTTGGGAGGCTGAGGCGGGTGGATTGCTTGAGC
CCAGGAGTTTGAGACCAGCCTGGCCAACGTGGCAAAACCTCGTCTCTGTTAAAAATTAGCCGGG
CGTGGTGGCACACTCCTGTAATCCCAGCTACTGGGGAGGCTGAGGCACGAGAATCACTTGAACC
CAGGAAGCGGGGTTGCAGTGAGCCAAAGGTACACCACTACACTCCAGCCTGGGCAACAGAGCAA
GACTCGGTCTCAAAAACAAAATTTAAAAAAGATATAAGGCAGTACTGTAAATTCAGTTGAATTT
TGATATCT
exemplary donor template for insertion at KIF11 locus
SEQ ID NO: 57
TTAAACTGGATAATTCTTTGTTGTGATGGGCTTTCCTGTGGACTGTACTATGTTGGTACACAAG
AAAAACAGTGTACTATGTGAATACTCACTCAAAGCCAGTAGCACTCCCTGATTGTAACACCAAA
AAAGTCTCTCAGCATTGCCAAATGTCCCCTGTGGCAGCAGAATCACTCCCTGATGAGAACCACT
ACCCTGGAGTAAAATCTATAACTATGTCTTAGAAAATAACACAGAAAATTAATATTTCTTTCAC
TCTACTCCTTCCATTAGTGATCAAATAAAGAAGGCATTTGGCGCTACTTGCCAAATTGTTGGCT
CAAACTTGTGCTGAACCTTTTTTGGTTTTCTACACTTAAGTTTTTTTGCCTATAACCCAGAGAA
CTTTGAAAATAGAGTGTAGTTAATGTGTATCTAATGTTACTTTGTATTGACTTAATTTTCCCGC
CTTAAATCCACAGCATAAAAAATCACATGGAAAAGACAAAGAAAACAGAGGCATCAACACACTG
GAACGGTCCAAGGTCGAGGAAACAACCGAGCACCTGGTCACCAAGAGCAGACTGCCTCTGAGAG
CCCAGATCAACCTGGGAAGCGGAGCTACTAACTTCAGCCTGCTGAAGCAGGCTGGAGACGTGGA
GGAGAACCCTGGACCTATGGTGAGCAAGGGCGAGGAGCTGTTCACCGGGGTGGTGCCCATCCTG
GTCGAGCTGGACGGCGACGTAAACGGCCACAAGTTCAGCGTGTCCGGCGAGGGCGAGGGCGATG
CCACCTACGGCAAGCTGACCCTGAAGTTCATCTGCACCACCGGCAAGCTGCCCGTGCCCTGGCC
CACCCTCGTGACCACCCTGACCTACGGCGTGCAGTGCTTCAGCCGCTACCCCGACCACATGAAG
CAGCACGACTTCTTCAAGTCCGCCATGCCCGAAGGCTACGTCCAGGAGCGCACCATCTTCTTCA
AGGACGACGGCAACTACAAGACCCGCGCCGAGGTGAAGTTCGAGGGCGACACCCTGGTGAACCG
CATCGAGCTGAAGGGCATCGACTTCAAGGAGGACGGCAACATCCTGGGGCACAAGCTGGAGTAC
AACTACAACAGCCACAACGTCTATATCATGGCCGACAAGCAGAAGAACGGCATCAAGGTGAACT
TCAAGATCCGCCACAACATCGAGGACGGCAGCGTGCAGCTCGCCGACCACTACCAGCAGAACAC
CCCCATCGGCGACGGCCCCGTGCTGCTGCCCGACAACCACTACCTGAGCACCCAGTCCGCCCTG
AGCAAAGACCCCAACGAGAAGCGCGATCACATGGTCCTGCTGGAGTTCGTGACCGCCGCCGGGA
TCACTCTCGGCATGGACGAGCTGTACAAGTGAGCGGCCGCGTCGAGTCTAGAGGGCCCGTTTAA
ACCCGCTGATCAGCCTCGACTGTGCCTTCTAGTTGCCAGCCATCTGTTGTTTGCCCCTCCCCCG
TGCCTTCCTTGACCCTGGAAGGTGCCACTCCCACTGTCCTTTCCTAATAAAATGAGGAAATTGC
ATCGCATTGTCTGAGTAGGTGTCATTCTATTCTGGGGGGTGGGGTGGGGCAGGACAGCAAGGGG
GAGGATTGGGAAGACAATAGCAGGCATGCTGGGGATGCGGTGGGCTCTATGGATTAACACACTG
GAGAGTTCTGAAGTGGAAGAAACTACAGAGCACTTGGTTACAAAGAGCAGATTACCTCTGCGAG
CCCAGATCAACCTTTAATTCACTTGGGGGTTGGCAATTTTATTTTTAAAGAAAACTTAAAAATA
AAACCTGAAACCCCAGAACTTGAGCCTTGTGTATAGATTTTAAAAGAATATATATATCAGCCGG
GCGCGGTGGCTCATGCCTGTAATCCCAGCACTTTGGGAGGCTGAGGCGGGTGGATTGCTTGAGC
CCAGGAGTTTGAGACCAGCCTGGCCAACGTGGCAAAACCTCGTCTCTGTTAAAAATTAGCCGGG
CGTGGTGGCACACTCCTGTAATCCCAGCTACTGGGGAGGCTGAGGCACGAGAATCACTTGAACC
CAGGAAGCGGGGTTGCAGTGAGCCAAAGGTACACCACTACACTCCAGCCTGGGCAACAGAGCAA
GACTCGGTCTCAAAAACAAAATTTAAAAAAGATATAAGGC
exemplary donor template for insertion at GAPDH locus
SEQ ID NO: 48
GAAGACTGTGGATGGCCCCTCCGGGAAACTGTGGCGTGATGGCCGCGGGGCTCTCCAGAACATC
ATCCCTGCCTCTACTGGCGCTGCCAAGGCTGTGGGCAAGGTCATCCCTGAGCTGAACGGGAAGC
TCACTGGCATGGCCTTCCGTGTCCCCACTGCCAACGTGTCAGTGGTGGACCTGACCTGCCGTCT
AGAAAAACCTGCCAAATATGATGACATCAAGAAGGTGGTGAAGCAGGCGTCGGAGGGCCCCCTC
AAGGGCATCCTGGGCTACACTGAGCACCAGGTGGTCTCCTCTGACTTCAACAGCGACACCCACT
CCTCCACCTTTGACGCTGGGGCTGGCATTGCCCTCAACGACCACTTTGTCAAGCTCATTTCCTG
GTATGTGGCTGGGGCCAGAGACTGGCTCTTAAAAAGTGCAGGGTCIGGCGCCCTCTGGTGGCTG
GCTCAGAAAAAGGGCCCTGACAACTCTTTACATCTTCTAGGTATGACAACGAGTTCGGATATAG
CAATAGAGTGGTCGATCTGATGGCTCATATGGCTAGCAAAGAGGGAAGCGGAGCTACTAACTTC
AGCCTGCTGAAGCAGGCTGGAGACGTGGAGGAGAACCCTGGACCTATGTGGCCCCTGGTAGCGG
CGCTGTTGCTGGGCTCGGCGTGCTGCGGATCAGCTCAGCTACTATTTAATAAAACAAAATCTGT
AGAATTCACGTTTTGTAATGACACTGTCGTCATTCCATGCTTTGTTACTAATATGGAGGCACAA
AACACTACTGAAGTATACGTAAAGTGGAAATTTAAAGGAAGAGATATTTACACCTTTGATGGAG
CTCTAAACAAGTCCACTGTCCCCACTGACTTTAGTAGTGCAAAAATTGAAGTCTCACAATTACT
AAAAGGAGATGCCTCTTTGAAGATGGATAAGAGTGATGCTGTCTCACACACAGGAAACTACACT
TGTGAAGTAACAGAATTAACCAGAGAAGGTGAAACGATCATCGAGCTAAAATATCGTGTTGTTT
CATGGTTTTCTCCAAATGAAAATATTCTTATTGTTATTTTCCCAATTTTTGCTATACTCCTGTT
CTGGGGACAGTTTGGTATTAAAACACTTAAATATAGATCCGGTGGTATGGATGAGAAAACAATT
GCTTTACTTGTTGCTGGACTAGTGATCACTGTCATTGTCATTGTTGGAGCCATTCTTTTCGTCC
CAGGTGAATATTCATTAAAGAATGCTACTGGCCTTGGTTTAATTGTGACTTCTACAGGGATATT
AATATTACTTCACTACTATGTGTTTAGTACAGCGATTGGATTAACCTCCTTCGTCATTGCCATA
TTGGTTATTCAGGTGATAGCCTATATCCTCGCTGTGGTTGGACTGAGTCTCTGTATTGCGGCGT
GTATACCAATGCATGGCCCTCTTCTGATTTCAGGTTTGAGTATCTTAGCTCTAGCACAATTACT
TGGACTAGTTTATATGAAATTTGTGGCTTCCAATCAGAAGACTATACAACCTCCTAGGAAAGCT
GTAGAGGAACCCCTTAATGCATTCAAAGAATCAAAAGGAATGATGAATGATGAATGAGCGGCCG
CGTCGAGTCTAGAGGGCCCGTTTAAACCCGCTGATCAGCCTCGACTGTGCCTTCTAGTTGCCAG
CCATCTGTTGTTTGCCCCTCCCCCGTGCCTTCCTTGACCCTGGAAGGTGCCACTCCCACTGTCC
TTTCCTAATAAAATGAGGAAATTGCATCGCATTGTCTGAGTAGGTGTCATTCTATTCTGGGGGG
TGGGGTGGGGCAGGACAGCAAGGGGGAGGATTGGGAAGACAATAGCAGGCATGCTGGGGATGCG
GTGGGCTCTATGGATTTGGCTACAGCAACAGGGTGGTGGACCTCATGGCCCACATGGCCTCCAA
GGAGTAAGACCCCTGGACCACCAGCCCCAGCAAGAGCACAAGAGGAAGAGAGAGACCCTCACTG
CTGGGGAGTCCCTGCCACACTCAGTCCCCCACCACACTGAATCTCCCCTCCTCACAGTTGCCAT
GTAGACCCCTTGAAGAGGGGAGGGGCCTAGGGAGCCGCACCTTGTCATGTACCATCAATAAAGT
ACCCTGTGCTCAACCAGTTACTTGTCCTGTCTTATTCTAGGGTCTGGGGCAGAGGGGAGGGAAG
CTGGGCTTGTGTCAAGGTGAGACATTCTTGCTGGGGAGGGACCTGGTATGTTCTCCTCAGACTG
AGGGTAGGGCCTCCAAACAGCCTTGCTTGCTTCGAGAACCATTTGCTTCCCGCTCAGACGTCTT
GAGTGCTACAGGAAGCTGGCACCACTACTTCAGAGAACAAGGCCTTTTCCTCTCCTCGCTCCAG
T
exemplary donor template for insertion at GAPDH locus
SEQ ID NO: 205
GAAGACTGTGGATGGCCCCTCCGGGAAACTGTGGCGTGATGGCCGCGGGGCTCTCCAGAACATC
ATCCCTGCCTCTACTGGCGCTGCCAAGGCTGTGGGCAAGGTCATCCCTGAGCTGAACGGGAAGC
TCACTGGCATGGCCTTCCGTGTCCCCACTGCCAACGTGTCAGTGGTGGACCTGACCTGCCGTCT
AGAAAAACCTGCCAAATATGATGACATCAAGAAGGTGGTGAAGCAGGCGTCGGAGGGCCCCCTC
AAGGGCATCCTGGGCTACACTGAGCACCAGGTGGTCTCCTCTGACTTCAACAGCGACACCCACT
CCTCCACCTTTGACGCTGGGGCTGGCATTGCCCTCAACGACCACTTTGTCAAGCTCATTTCCTG
GTATGTGGCTGGGGCCAGAGACTGGCTCTTAAAAAGTGCAGGGTCTGGCGCCCTCTGGTGGCTG
GCTCAGAAAAAGGGCCCTGACAACTCTTTACATCTTCTAGGTATGACAACGAGTTCGGATATAG
CAATAGAGTGGTCGATCTGATGGCTCATATGGCTAGCAAAGAGGGAAGCGGAGCTACTAACTTC
AGCCTGCTGAAGCAGGCTGGAGACGTGGAGGAGAACCCTGGACCTATGTGGCAACTGCTGCTGC
CTACAGCTCTGCTGCTTCTGGTGTCTGCCGGCATGAGAACCGAGGATCTGCCTAAGGCCGTGGT
GTTCCTGGAACCTCAGTGGTACAGAGTGCTGGAAAAGGACAGCGTGACCCTGAAGTGCCAGGGC
GCCTATTCTCCCGAGGACAATAGCACCCAGTGGTTCCACAACGAGAGCCTGATCAGCAGCCAGG
CCAGCAGCTACTTTATCGATGCCGCCACCGTGGACGACAGCGGCGAGTACAGATGCCAGACCAA
TCTGAGCACCCTGAGCGACCCTGTGCAGCTGGAAGTGCACATTGGATGGTTGCTGCTGCAAGCC
CCTAGATGGGTGTTCAAAGAAGAGGACCCCATCCACCTGAGATGCCACTCTTGGAAGAACACAG
CCCTGCACAAAGTGACCTACCTGCAGAACGGCAAGGGCAGAAAGTACTTCCACCACAACAGCGA
CTTCTACATCCCCAAGGCCACACTGAAGGACTCCGGCTCCTACTTCTGCAGAGGCCTGGTCGGC
AGCAAGAACGTGTCCAGCGAGACAGTGAACATCACCATCACACAGGGCCTCGCCGTGTCTACCA
TCAGCAGCTTTTTCCCACCTGGCTATCAGGTGTCCTTCTGCCTGGTCATGGTGCTGCTGTTCGC
CGTGGATACCGGCCTGTACTTCAGCGTCAAGACCAACATCCGGTCCAGCACCAGAGACTGGAAG
GACCACAAGTTCAAGTGGCGGAAGGACCCTCAGGACAAGTAAGCGGCCGCGTCGAGTCTAGAGG
GCCCGTTTAAACCCGCTGATCAGCCTCGACTGTGCCTTCTAGTTGCCAGCCATCTGTTGTTTGC
CCCTCCCCCGTGCCTTCCTTGACCCTGGAAGGTGCCACTCCCACTGTCCTTTCCTAATAAAATG
AGGAAATTGCATCGCATTGTCTGAGTAGGTGTCATTCTATTCTGGGGGGTGGGGTGGGGCAGGA
CAGCAAGGGGGAGGATTGGGAAGACAATAGCAGGCATGCTGGGGATGCGGTGGGCTCTATGGAT
TTGGCTACAGCAACAGGGTGGTGGACCTCATGGCCCACATGGCCTCCAAGGAGTAAGACCCCTG
GACCACCAGCCCCAGCAAGAGCACAAGAGGAAGAGAGAGACCCTCACTGCTGGGGAGTCCCTGC
CACACTCAGTCCCCCACCACACTGAATCTCCCCTCCTCACAGTTGCCATGTAGACCCCTTGAAG
AGGGGAGGGGCCTAGGGAGCCGCACCTTGTCATGTACCATCAATAAAGTACCCTGTGCTCAACC
AGTTACTTGTCCTGTCTTATTCTAGGGTCTGGGGCAGAGGGGAGGGAAGCTGGGCTTGTGTCAA
GGTGAGACATTCTTGCTGGGGAGGGACCTGGTATGTTCTCCTCAGACTGAGGGTAGGGCCTCCA
AACAGCCTTGCTTGCTTCGAGAACCATTTGCTTCCCGCTCAGACGTCTTGAGTGCTACAGGAAG
CTGGCACCACTACTTCAGAGAACAAGGCCTTTTCCTCTCCTCGCTCCAGT
exemplary donor template for insertion at GAPDH locus
SEQ ID NO: 206
GTCGACGAAGACTGTGGATGGCCCCTCCGGGAAACTGTGGCGTGATGGCCGCGGGGCTCTCCAG
AACATCATCCCTGCCTCTACTGGCGCTGCCAAGGCTGTGGGCAAGGTCATCCCTGAGCTGAACG
GGAAGCTCACTGGCATGGCCTTCCGTGTCCCCACTGCCAACGTGTCAGTGGTGGACCTGACCTG
CCGTCTAGAAAAACCTGCCAAATATGATGACATCAAGAAGGTGGTGAAGCAGGCGTCGGAGGGC
CCCCTCAAGGGCATCCTGGGCTACACTGAGCACCAGGTGGTCTCCTCTGACTTCAACAGCGACA
CCCACTCCTCCACCTTTGACGCTGGGGCTGGCATTGCCCTCAACGACCACTTTGTCAAGCTCAT
TTCCTGGTATGTGGCTGGGGCCAGAGACTGGCTCTTAAAAAGTGCAGGGTCTGGCGCCCTCTGG
TGGCTGGCTCAGAAAAAGGGCCCTGACAACTCTTTACATCTTCTAGGTATGACAACGAGTTCGG
ATATAGCAATAGAGTGGTCGATCTGATGGCTCATATGGCTAGCAAAGAGGGAAGCGGAGCTACT
AACTTCAGCCTGCTGAAGCAGGCTGGAGACGTGGAGGAGAACCCTGGACCTATGCTTCTCCTGG
TGACAAGCCTTCTGCTCTGTGAGTTACCACACCCAGCATTCCTCCTGATCCCAGACATCCAGAT
GACACAGACTACATCCTCCCTGTCTGCCTCTCTGGGAGACAGAGTCACCATCAGTTGCAGGGCA
AGTCAGGACATTAGTAAATATTTAAATTGGTATCAGCAGAAACCAGATGGAACTGTTAAACTCC
TGATCTACCATACATCAAGATTACACTCAGGAGTCCCATCAAGGTTCAGTGGCAGTGGGTCTGG
AACAGATTATTCTCTCACCATTAGCAACCTGGAGCAAGAAGATATTGCCACTTACTTTTGCCAA
CAGGGTAATACGCTTCCGTACACGTTCGGAGGGGGGACTAAGTTGGAAATAACAGGCTCCACCT
CTGGATCCGGCAAGCCCGGATCTGGCGAGGGATCCACCAAGGGCGAGGTGAAACTGCAGGAGTC
AGGACCTGGCCTGGTGGCGCCCTCACAGAGCCTGTCCGTCACATGCACTGTCTCAGGGGTCTCA
TTACCCGACTATGGTGTAAGCTGGATTCGCCAGCCTCCACGAAAGGGTCTGGAGTGGCTGGGAG
TAATATGGGGTAGTGAAACCACATACTATAATTCAGCTCTCAAATCCAGACTGACCATCATCAA
GGACAACTCCAAGAGCCAAGTTTTCTTAAAAATGAACAGTCTGCAAACTGATGACACAGCCATT
TACTACTGTGCCAAACATTATTACTACGGTGGTAGCTATGCTATGGACTACTGGGGTCAAGGAA
CCTCAGTCACCGTCTCCTCAGCGGCCGCAATTGAAGTTATGTATCCTCCTCCTTACCTAGACAA
TGAGAAGAGCAATGGAACCATTATCCATGTGAAAGGGAAACACCTTTGTCCAAGTCCCCTATTT
CCCGGACCTTCTAAGCCCTTTTGGGTGCTGGTGGTGGTTGGGGGAGTCCTGGCTTGCTATAGCT
TGCTAGTAACAGTGGCCTTTATTATTTTCTGGGTGAGGAGTAAGAGGAGCAGGCTCCTGCACAG
TGACTACATGAACATGACTCCCCGCCGCCCCGGGCCCACCCGCAAGCATTACCAGCCCTATGCC
CCACCACGCGACTTCGCAGCCTATCGCTCCAGAGTGAAGTTCAGCAGGAGCGCAGACGCCCCCG
CGTACCAGCAGGGCCAGAACCAGCTCTATAACGAGCTCAATCTAGGACGAAGAGAGGAGTACGA
TGTTTTGGACAAGAGACGTGGCCGGGACCCTGAGATGGGGGGAAAGCCGAGAAGGAAGAACCCT
CAGGAAGGCCTGTACAATGAACTGCAGAAAGATAAGATGGCGGAGGCCTACAGTGAGATTGGGA
TGAAAGGCGAGCGCCGGAGGGGCAAGGGGCACGATGGCCTTTACCAGGGTCTCAGTACAGCCAC
CAAGGACACCTACGACGCCCTTCACATGCAGGCCCTGCCCCCTCGCTAAAGCGGCCGCGTCGAG
TCTAGAGGGCCCGTTTAAACCCGCTGATCAGCCTCGACTGTGCCTTCTAGTTGCCAGCCATCTG
TTGTTTGCCCCTCCCCCGTGCCTTCCTTGACCCTGGAAGGTGCCACTCCCACTGTCCTTTCCTA
ATAAAATGAGGAAATTGCATCGCATTGTCTGAGTAGGTGTCATTCTATTCTGGGGGGTGGGGTG
GGGCAGGACAGCAAGGGGGAGGATTGGGAAGACAATAGCAGGCATGCTGGGGATGCGGTGGGCT
CTATGGATTTGGCTACAGCAACAGGGTGGTGGACCTCATGGCCCACATGGCCTCCAAGGAGTAA
GACCCCTGGACCACCAGCCCCAGCAAGAGCACAAGAGGAAGAGAGAGACCCTCACTGCTGGGGA
GTCCCTGCCACACTCAGTCCCCCACCACACTGAATCTCCCCTCCTCACAGTTGCCATGTAGACC
CCTTGAAGAGGGGAGGGGCCTAGGGAGCCGCACCTTGTCATGTACCATCAATAAAGTACCCTGT
GCTCAACCAGTTACTTGTCCTGTCTTATTCTAGGGTCTGGGGCAGAGGGGAGGGAAGCTGGGCT
TGTGTCAAGGTGAGACATTCTTGCTGGGGAGGGACCTGGTATGTTCTCCTCAGACTGAGGGTAG
GGCCTCCAAACAGCCTTGCTTGCTTCGAGAACCATTTGCTTCCCGCTCAGACGTCTTGAGTGCT
ACAGGAAGCTGGCACCACTACTTCAGAGAACAAGGCCTTTTCCTCTCCTCGCTCCAGT
exemplary donor template for insertion at GAPDH locus
SEQ ID NO: 207
GTCGACGAAGACTGTGGATGGCCCCTCCGGGAAACTGTGGCGTGATGGCCGCGGGGCTCTCCAG
AACATCATCCCTGCCTCTACTGGCGCTGCCAAGGCTGTGGGCAAGGTCATCCCTGAGCTGAACG
GGAAGCTCACTGGCATGGCCTTCCGTGTCCCCACTGCCAACGTGTCAGTGGTGGACCTGACCTG
CCGTCTAGAAAAACCTGCCAAATATGATGACATCAAGAAGGTGGTGAAGCAGGCGTCGGAGGGC
CCCCTCAAGGGCATCCTGGGCTACACTGAGCACCAGGTGGTCTCCTCTGACTTCAACAGCGACA
CCCACTCCTCCACCTTTGACGCTGGGGCTGGCATTGCCCTCAACGACCACTTTGTCAAGCTCAT
TTCCTGGTATGTGGCTGGGGCCAGAGACTGGCTCTTAAAAAGTGCAGGGTCTGGCGCCCTCTGG
TGGCTGGCTCAGAAAAAGGGCCCTGACAACTCTTTACATCTTCTAGGTATGACAACGAGTTCGG
ATATAGCAATAGAGTGGTCGATCTGATGGCTCATATGGCTAGCAAAGAGGGAAGCGGAGCTACT
AACTTCAGCCTGCTGAAGCAGGCTGGAGACGTGGAGGAGAACCCTGGACCTATGGCACTCCCCG
TCACCGCCCTTCTCTTGCCCCTCGCCCTGCTGCTGCATGCTGCCAGGCCCATGGACGAAGTGCA
GCTCGTGGAGTCCGGTGGAGGACTCGTCCAACCGGGCGGATCCCTTCGCTTGTCCTGCGCCGCA
TCAGGCTTCAGCTTCACCAACTATGGCGTCCACTGGGTCAGACAGGCCCCCGGAAAGGGACTGG
AATGGGTGTCCGTGATCTGGAGCGGCGGGAACACCGACTACAACACCTCCGTGAAGGGCCGGTT
CACTATTAGCCGCGACAACTCCAAGAACACTCTGTACCTCCAAATGAACTCCCTGAGGGCCGAA
GATACTGCTGTGTACTATTGCGCGAGAGCCCTGACCTACTACGACTACGAGTTCGCGTACTGGG
GCCAGGGGACTCTCGTGACCGTGTCCAGCGGTGGTGGAGGTTCCGGAGGCGGAGGTTCTGGTGG
CGGGGGATCAGAAATCGTGCTGACTCAGTCCCCTGCGACCTTGTCCCTGAGCCCTGGAGAACGG
GCCACCCTGAGCTGTAGAGCCAGCCAGAGCATCGGGACAAATATTCACTGGTACCAGCAGAAAC
CCGGACAAGCACCACGGCTGCTGATCTACTACGCCTCCGAGTCGATTTCCGGAATCCCGGCTCG
CTTTTCGGGGTCTGGATCGGGAACGGACTTCACTCTGACCATCTCGTCGCTGGAACCCGAGGAT
TTCGCCGTGTACTACTGCCAACAGAACAACAATTGGCCGACCACGTTCGGCCAGGGCACCAAGC
TCGAGATTAAGGGATCACTGGAAGCGGCCGCAACCACAACACCTGCTCCAAGGCCCCCCACACC
CGCTCCAACTATAGCCAGCCAACCATTGAGCCTCAGACCTGAAGCTTGCAGGCCCGCAGCAGGA
GGCGCCGTCCATACGCGAGGCCTGGACTTCGCGTGTGATATTTATATTTGGGCCCCTTTGGCCG
GAACATGTGGGGTGTTGCTTCTCTCCCTTGTGATCACTCTGTATTGTAAGCGCGGGAGAAAGAA
GCTCCTGTACATCTTCAAGCAGCCTTTTATGCGACCTGTGCAAACCACTCAGGAAGAAGATGGG
TGTTCATGCCGCTTCCCCGAGGAGGAAGAAGGAGGGTGTGAACTGAGGGTGAAATTTTCTAGAA
GCGCCGATGCTCCCGCATATCAGCAGGGTCAGAATCAGCTCTACAATGAATTGAATCTCGGCAG
GCGAGAAGAGTACGATGTTCTGGACAAGAGACGGGGCAGGGATCCCGAGATGGGGGGAAAGCCC
CGGAGAAAAAATCCTCAGGAGGGGTTGTACAATGAGCTGCAGAAGGACAAGATGGCTGAAGCCT
ATAGCGAGATCGGAATGAAAGGCGAAAGACGCAGAGGCAAGGGGCATGACGGTCTGTACCAGGG
TCTCTCTACAGCCACCAAGGACACTTATGATGCGTTGCATATGCAAGCCTTGCCACCCCGCTAA
AGCGGCCGCGTCGAGTCTAGAGGGCCCGTTTAAACCCGCTGATCAGCCTCGACTGTGCCTTCTA
GTTGCCAGCCATCTGTTGTTTGCCCCTCCCCCGTGCCTTCCTTGACCCTGGAAGGTGCCACTCC
CACTGTCCTTTCCTAATAAAATGAGGAAATTGCATCGCATTGTCTGAGTAGGTGTCATTCTATT
CTGGGGGGTGGGGTGGGGCAGGACAGCAAGGGGGAGGATTGGGAAGACAATAGCAGGCATGCTG
GGGATGCGGTGGGCTCTATGGATTTGGCTACAGCAACAGGGTGGTGGACCTCATGGCCCACATG
GCCTCCAAGGAGTAAGACCCCTGGACCACCAGCCCCAGCAAGAGCACAAGAGGAAGAGAGAGAC
CCTCACTGCTGGGGAGTCCCTGCCACACTCAGTCCCCCACCACACTGAATCTCCCCTCCTCACA
GTTGCCATGTAGACCCCTTGAAGAGGGGAGGGGCCTAGGGAGCCGCACCTTGTCATGTACCATC
AATAAAGTACCCTGTGCTCAACCAGTTACTTGTCCTGTCTTATTCTAGGGTCTGGGGCAGAGGG
GAGGGAAGCTGGGCTTGTGTCAAGGTGAGACATTCTTGCTGGGGAGGGACCTGGTATGTTCTCC
TCAGACTGAGGGTAGGGCCTCCAAACAGCCTTGCTTGCTTCGAGAACCATTTGCTTCCCGCTCA
GACGTCTTGAGTGCTACAGGAAGCTGGCACCACTACTTCAGAGAACAAGGCCTTTTCCTCTCCT
CGCTCCAGT
exemplary donor template for insertion at GAPDH locus
SEQ ID NO: 208
GAAGACTGTGGATGGCCCCTCCGGGAAACTGTGGCGTGATGGCCGCGGGGCTCTCCAGAACATC
ATCCCTGCCTCTACTGGCGCTGCCAAGGCTGTGGGCAAGGTCATCCCTGAGCTGAACGGGAAGC
TCACTGGCATGGCCTTCCGTGTCCCCACTGCCAACGTGTCAGTGGTGGACCTGACCTGCCGTCT
AGAAAAACCTGCCAAATATGATGACATCAAGAAGGTGGTGAAGCAGGCGTCGGAGGGCCCCCTC
AAGGGCATCCTGGGCTACACTGAGCACCAGGTGGTCTCCTCTGACTTCAACAGCGACACCCACT
CCTCCACCTTTGACGCTGGGGCTGGCATTGCCCTCAACGACCACTTTGTCAAGCTCATTTCCTG
GTATGTGGCTGGGGCCAGAGACTGGCTCTTAAAAAGTGCAGGGTCTGGCGCCCTCTGGTGGCTG
GCTCAGAAAAAGGGCCCTGACAACTCTTTACATCTTCTAGGTATGACAACGAGTTCGGATATAG
CAATAGAGTGGTCGATCTGATGGCTCATATGGCTAGCAAAGAGGGAAGCGGAGCTACTAACTTC
AGCCTGCTGAAGCAGGCTGGAGACGTGGAGGAGAACCCTGGACCTATGGATTGGACCTGGATCC
TGTTTCTGGTGGCCGCTGCCACAAGAGTGCACAGCAATTGGGTCAACGTGATCAGCGACCTGAA
GAAGATCGAGGACCTGATCCAGAGCATGCACATCGACGCCACACTGTACACCGAGTCCGATGTG
CACCCTAGCTGCAAAGTGACCGCCATGAAGTGCTTTCTGCTGGAACTGCAAGTGATCAGCCTGG
AAAGCGGCGACGCCAGCATCCACGATACCGTGGAAAACCTGATCATCCTGGCCAACAACAGCCT
GAGCAGCAACGGCAATGTGACCGAGAGCGGCTGCAAAGAGTGCGAGGAACTGGAAGAGAAGAAC
ATCAAAGAGTTCCTCCAGAGCTTCGTCCACATCGTGCAGATGTTCATCAACACCAGCGGAAGCG
GAGCCACAAACTTCTCTCTGCTGAAGCAGGCAGGAGATGTTGAAGAAAACCCTGGACCTATCAC
CTGTCCTCCACCTATGAGCGTGGAACACGCCGACATCTGGGTCAAGAGCTACAGCCTGTACAGC
AGAGAGCGGTACATCTGCAACAGCGGCTTCAAGAGAAAGGCCGGCACAAGCAGCCTGACCGAGT
GTGTGCTGAACAAGGCCACAAACGTGGCCCACTGGACCACACCTAGCCTGAAGTGCATCAGAGA
TCCCGCTCTGGTTCATCAGAGGCCTGCCCCTCCATCTACAGTGACAACAGCTGGCGTGACCCCT
CAGCCTGAGTCTCTGTCTCCATCTGGAAAAGAGCCTGCCGCCAGCTCTCCCAGCTCTAACAATA
CTGCTGCCACCACAGCCGCTATCGTGCCTGGATCTCAGCTGATGCCTAGCAAGAGCCCTAGCAC
CGGCACAACAGAGATCAGCTCTCACGAGAGCAGCCACGGAACACCTTCTCAGACCACCGCCAAG
AATTGGGAGCTGACAGCCTCTGCCTCTCATCAGCCACCTGGCGTGTACCCACAGGGCCACTCTG
ATACAACAGTGGCCATCAGCACCAGCACCGTTCTGCTGTGTGGCCTGTCTGCTGTTAGCCTGCT
GGCCTGCTACCTGAAGTCTAGACAGACACCTCCTCTGGCCAGCGTGGAAATGGAAGCCATGGAA
GCTCTGCCTGTCACATGGGGCACCAGCAGCAGAGATGAGGACCTCGAGAATTGCAGCCACCACC
TGGGAAGCGGAGCCACAAACTTCTCTCTGCTGAAGCAGGCAGGAGATGTTGAAGAAAACCCTGG
ACCTATGGTGAGCAAGGGCGAGGAGCTGTTCACCGGGGTGGTGCCCATCCTGGTCGAGCTGGAC
GGCGACGTAAACGGCCACAAGTTCAGCGTGTCCGGCGAGGGCGAGGGCGATGCCACCTACGGCA
AGCTGACCCTGAAGTTCATCTGCACCACCGGCAAGCTGCCCGTGCCCTGGCCCACCCTCGTGAC
CACCCTGACCTACGGCGTGCAGTGCTTCAGCCGCTACCCCGACCACATGAAGCAGCACGACTTC
TTCAAGTCCGCCATGCCCGAAGGCTACGTCCAGGAGCGCACCATCTTCTTCAAGGACGACGGCA
ACTACAAGACCCGCGCCGAGGTGAAGTTCGAGGGCGACACCCTGGTGAACCGCATCGAGCTGAA
GGGCATCGACTTCAAGGAGGACGGCAACATCCTGGGGCACAAGCTGGAGTACAACTACAACAGC
CACAACGTCTATATCATGGCCGACAAGCAGAAGAACGGCATCAAGGTGAACTTCAAGATCCGCC
ACAACATCGAGGACGGCAGCGTGCAGCTCGCCGACCACTACCAGCAGAACACCCCCATCGGCGA
CGGCCCCGTGCTGCTGCCCGACAACCACTACCTGAGCACCCAGTCCGCCCTGAGCAAAGACCCC
AACGAGAAGCGCGATCACATGGTCCTGCTGGAGTTCGTGACCGCCGCCGGGATCACTCTCGGCA
TGGACGAGCTGTACAAGTAAGCGGCCGCGTCGAGTCTAGAGGGCCCGTTTAAACCCGCTGATCA
GCCTCGACTGTGCCTTCTAGTTGCCAGCCATCTGTTGTTTGCCCCTCCCCCGTGCCTTCCTTGA
CCCTGGAAGGTGCCACTCCCACTGTCCTTTCCTAATAAAATGAGGAAATTGCATCGCATTGTCT
GAGTAGGTGTCATTCTATTCTGGGGGGTGGGGTGGGGCAGGACAGCAAGGGGGAGGATTGGGAA
GACAATAGCAGGCATGCTGGGGATGCGGTGGGCTCTATGGATTTGGCTACAGCAACAGGGTGGT
GGACCTCATGGCCCACATGGCCTCCAAGGAGTAAGACCCCTGGACCACCAGCCCCAGCAAGAGC
ACAAGAGGAAGAGAGAGACCCTCACTGCTGGGGAGTCCCTGCCACACTCAGTCCCCCACCACAC
TGAATCTCCCCTCCTCACAGTTGCCATGTAGACCCCTTGAAGAGGGGAGGGGCCTAGGGAGCCG
CACCTTGTCATGTACCATCAATAAAGTACCCTGTGCTCAACCAGTTACTTGTCCTGTCTTATTC
TAGGGTCTGGGGCAGAGGGGAGGGAAGCTGGGCTTGTGTCAAGGTGAGACATTCTTGCTGGGGA
GGGACCTGGTATGTTCTCCTCAGACTGAGGGTAGGGCCTCCAAACAGCCTTGCTTGCTTCGAGA
ACCATTTGCTTCCCGCTCAGACGTCTTGAGTGCTACAGGAAGCTGGCACCACTACTTCAGAGAA
CAAGGCCTTTTCCTCTCCTCGCTCCAGT
exemplary donor template for insertion at GAPDH locus
SEQ ID NO: 209
GAAGACTGTGGATGGCCCCTCCGGGAAACTGTGGCGTGATGGCCGCGGGGCTCTCCAGAACATC
ATCCCTGCCTCTACTGGCGCTGCCAAGGCTGTGGGCAAGGTCATCCCTGAGCTGAACGGGAAGC
TCACTGGCATGGCCTTCCGTGTCCCCACTGCCAACGTGTCAGTGGTGGACCTGACCTGCCGTCT
AGAAAAACCTGCCAAATATGATGACATCAAGAAGGTGGTGAAGCAGGCGTCGGAGGGCCCCCTC
AAGGGCATCCTGGGCTACACTGAGCACCAGGTGGTCTCCTCTGACTTCAACAGCGACACCCACT
CCTCCACCTTTGACGCTGGGGCTGGCATTGCCCTCAACGACCACTTTGTCAAGCTCATTTCCTG
GTATGTGGCTGGGGCCAGAGACTGGCTCTTAAAAAGTGCAGGGTCTGGCGCCCTCTGGTGGCTG
GCTCAGAAAAAGGGCCCTGACAACTCTTTACATCTTCTAGGTATGACAACGAGTTCGGATATAG
CAATAGAGTGGTCGATCTGATGGCTCATATGGCTAGCAAAGAGGGAAGCGGAGCTACTAACTTC
AGCCTGCTGAAGCAGGCTGGAGACGTGGAGGAGAACCCTGGACCTATGTGGCAGCTGTTGCTGC
CGACAGCCCTCCTGTTGCTGGTCTCCGCTGGCATGAGAACCGAGGATCTGCCTAAGGCCGTGGT
GTTCCTGGAACCTCAGTGGTACAGAGTGCTGGAAAAGGACAGCGTGACCCTGAAGTGCCAGGGC
GCCTATTCTCCCGAGGACAATAGCACCCAGTGGTTCCACAACGAGAGCCTGATCAGCAGCCAGG
CCAGCAGCTACTTTATCGATGCCGCCACCGTGGACGACAGCGGCGAGTACAGATGCCAGACCAA
TCTGAGCACCCTGAGCGACCCTGTGCAGCTGGAAGTGCACATTGGATGGTTGCTGCTGCAAGCC
CCTAGATGGGTGTTCAAAGAAGAGGACCCCATCCACCTGAGATGCCACTCTTGGAAGAACACAG
CCCTGCACAAAGTGACCTACCTGCAGAACGGCAAGGGCAGAAAGTACTTCCACCACAACAGCGA
CTTCTACATCCCCAAGGCCACACTGAAGGACTCCGGCTCCTACTTCTGCAGAGGCCTGGTCGGC
AGCAAGAACGTGTCCAGCGAGACAGTGAACATCACCATCACACAGGGCCTCGCCGTGTCTACCA
TCAGCAGCTTTTTCCCACCTGGCTATCAGGTGTCCTTCTGCCTGGTCATGGTGCTGCTGTTCGC
CGTGGATACCGGCCTGTACTTCAGCGTCAAGACCAACATCCGGTCCAGCACCAGAGACTGGAAG
GACCACAAGTTCAAGTGGCGGAAGGACCCTCAGGACAAGGGAAGCGGAGCCACAAACTTCTCTC
TGCTGAAGCAGGCAGGAGATGTTGAAGAAAACCCTGGACCTATGGATTGGACCTGGATCCTGTT
TCTGGTGGCCGCTGCCACAAGAGTGCACAGCAATTGGGTCAACGTGATCAGCGACCTGAAGAAG
ATCGAGGACCTGATCCAGAGCATGCACATCGACGCCACACTGTACACCGAGTCCGATGTGCACC
CTAGCTGCAAAGTGACCGCCATGAAGTGCTTTCTGCTGGAACTGCAAGTGATCAGCCTGGAAAG
CGGCGACGCCAGCATCCACGATACCGTGGAAAACCTGATCATCCTGGCCAACAACAGCCTGAGC
AGCAACGGCAATGTGACCGAGAGCGGCTGCAAAGAGTGCGAGGAACTGGAAGAGAAGAACATCA
AAGAGTTCCTCCAGAGCTTCGTCCACATCGTGCAGATGTTCATCAACACCAGCGGAAGCGGAGC
CACAAACTTCTCTCTGCTGAAGCAGGCAGGAGATGTTGAAGAAAACCCTGGACCTATCACCTGT
CCTCCACCTATGAGCGTGGAACACGCCGACATCTGGGTCAAGAGCTACAGCCTGTACAGCAGAG
AGCGGTACATCTGCAACAGCGGCTTCAAGAGAAAGGCCGGCACAAGCAGCCTGACCGAGTGTGT
GCTGAACAAGGCCACAAACGTGGCCCACTGGACCACACCTAGCCTGAAGTGCATCAGAGATCCC
GCTCTGGTTCATCAGAGGCCTGCCCCTCCATCTACAGTGACAACAGCTGGCGTGACCCCTCAGC
CTGAGTCTCTGTCTCCATCTGGAAAAGAGCCTGCCGCCAGCTCTCCCAGCTCTAACAATACTGC
TGCCACCACAGCCGCTATCGTGCCTGGATCTCAGCTGATGCCTAGCAAGAGCCCTAGCACCGGC
ACAACAGAGATCAGCTCTCACGAGAGCAGCCACGGAACACCTTCTCAGACCACCGCCAAGAATT
GGGAGCTGACAGCCTCTGCCTCTCATCAGCCACCTGGCGTGTACCCACAGGGCCACTCTGATAC
AACAGTGGCCATCAGCACCAGCACCGTTCTGCTGTGTGGCCTGTCTGCTGTTAGCCTGCTGGCC
TGCTACCTGAAGTCTAGACAGACACCTCCTCTGGCCAGCGTGGAAATGGAAGCCATGGAAGCTC
TGCCTGTCACATGGGGCACCAGCAGCAGAGATGAGGACCTCGAGAATTGCAGCCACCACCTGTA
AGCGGCCGCGTCGAGTCTAGAGGGCCCGTTTAAACCCGCTGATCAGCCTCGACTGTGCCTTCTA
GTTGCCAGCCATCTGTTGTTTGCCCCTCCCCCGTGCCTTCCTTGACCCTGGAAGGTGCCACTCC
CACTGTCCTTTCCTAATAAAATGAGGAAATTGCATCGCATTGTCTGAGTAGGTGTCATTCTATT
CTGGGGGGTGGGGTGGGGCAGGACAGCAAGGGGGAGGATTGGGAAGACAATAGCAGGCATGCTG
GGGATGCGGTGGGCTCTATGGATTTGGCTACAGCAACAGGGTGGTGGACCTCATGGCCCACATG
GCCTCCAAGGAGTAAGACCCCTGGACCACCAGCCCCAGCAAGAGCACAAGAGGAAGAGAGAGAC
CCTCACTGCTGGGGAGTCCCTGCCACACTCAGTCCCCCACCACACTGAATCTCCCCTCCTCACA
GTTGCCATGTAGACCCCTTGAAGAGGGGAGGGGCCTAGGGAGCCGCACCTTGTCATGTACCATC
AATAAAGTACCCTGTGCTCAACCAGTTACTTGTCCTGTCTTATTCTAGGGTCTGGGGCAGAGGG
GAGGGAAGCTGGGCTTGTGTCAAGGTGAGACATTCTTGCTGGGGAGGGACCTGGTATGTTCTCC
TCAGACTGAGGGTAGGGCCTCCAAACAGCCTTGCTTGCTTCGAGAACCATTTGCTTCCCGCTCA
GACGTCTTGAGTGCTACAGGAAGCTGGCACCACTACTTCAGAGAACAAGGCCTTTTCCTCTCCT
CGCTCCAGT
exemplary donor template for insertion at GAPDH locus
SEQ ID NO: 210
GAAGACTGTGGATGGCCCCTCCGGGAAACTGTGGCGTGATGGCCGCGGGGCTCTCCAGAACATC
ATCCCTGCCTCTACTGGCGCTGCCAAGGCTGTGGGCAAGGTCATCCCTGAGCTGAACGGGAAGC
TCACTGGCATGGCCTTCCGTGTCCCCACTGCCAACGTGTCAGTGGTGGACCTGACCTGCCGTCT
AGAAAAACCTGCCAAATATGATGACATCAAGAAGGTGGTGAAGCAGGCGTCGGAGGGCCCCCTC
AAGGGCATCCTGGGCTACACTGAGCACCAGGTGGTCTCCTCTGACTTCAACAGCGACACCCACT
CCTCCACCTTTGACGCTGGGGCTGGCATTGCCCTCAACGACCACTTTGTCAAGCTCATTTCCTG
GTATGTGGCTGGGGCCAGAGACTGGCTCTTAAAAAGTGCAGGGTCTGGCGCCCTCTGGTGGCTG
GCTCAGAAAAAGGGCCCTGACAACTCTTTACATCTTCTAGGTATGACAACGAGTTCGGATATAG
CAATAGAGTGGTCGATCTGATGGCTCATATGGCTAGCAAAGAGGGAAGCGGAGCTACTAACTTC
AGCCTGCTGAAGCAGGCTGGAGACGTGGAGGAGAACCCTGGACCTATGGATTGGACCTGGATCC
TGTTTCTGGTGGCCGCTGCCACAAGAGTGCACAGCAATTGGGTCAACGTGATCAGCGACCTGAA
GAAGATCGAGGACCTGATCCAGAGCATGCACATCGACGCCACACTGTACACCGAGTCCGATGTG
CACCCTAGCTGCAAAGTGACCGCCATGAAGTGCTTTCTGCTGGAACTGCAAGTGATCAGCCTGG
AAAGCGGCGACGCCAGCATCCACGATACCGTGGAAAACCTGATCATCCTGGCCAACAACAGCCT
GAGCAGCAACGGCAATGTGACCGAGAGCGGCTGCAAAGAGTGCGAGGAACTGGAAGAGAAGAAC
ATCAAAGAGTTCCTCCAGAGCTTCGTCCACATCGTGCAGATGTTCATCAACACCAGCTCTGGCG
GAGGAAGCGGAGGCGGAGGATCTGGTGGTGGTGGATCTGGCGGCGGTGGTAGTGGCGGAGGTTC
TCTGCAAATCACCTGTCCTCCACCTATGAGCGTGGAACACGCCGACATCTGGGTCAAGAGCTAC
AGCCTGTACAGCAGAGAGCGGTACATCTGCAACAGCGGCTTCAAGAGAAAGGCCGGCACAAGCA
GCCTGACCGAGTGTGTGCTGAACAAGGCCACAAACGTGGCCCACTGGACCACACCTAGCCTGAA
GTGCATCAGAGATCCCGCTCTGGTTCATCAGAGGCCTGCCCCTCCATCTACAGTGACAACAGCT
GGCGTGACCCCTCAGCCTGAGTCTCTGTCTCCATCTGGAAAAGAGCCTGCCGCCAGCTCTCCCA
GCTCTAACAATACTGCTGCCACCACAGCCGCTATCGTGCCTGGATCTCAGCTGATGCCTAGCAA
GAGCCCTAGCACCGGCACAACAGAGATCAGCTCTCACGAGAGCAGCCACGGAACACCTTCTCAG
ACCACCGCCAAGAATTGGGAGCTGACAGCCTCTGCCTCTCATCAGCCACCTGGCGTGTACCCAC
AGGGCCACTCTGATACAACAGTGGCCATCAGCACCAGCACCGTTCTGCTGTGTGGCCTGTCTGC
TGTTAGCCTGCTGGCCTGCTACCTGAAGTCTAGACAGACACCTCCTCTGGCCAGCGTGGAAATG
GAAGCCATGGAAGCTCTGCCTGTCACATGGGGCACCAGCAGCAGAGATGAGGACCTCGAGAATT
GCAGCCACCACCTGGGAAGCGGAGCCACAAACTTCTCTCTGCTGAAGCAGGCAGGAGATGTTGA
AGAAAACCCTGGACCTATGTGGCAGCTGTTGCTGCCGACAGCCCTCCTGTTGCTGGTCTCCGCT
GGCATGAGAACCGAGGATCTGCCTAAGGCCGTGGTGTTCCTGGAACCTCAGTGGTACAGAGTGC
TGGAAAAGGACAGCGTGACCCTGAAGTGCCAGGGCGCCTATTCTCCCGAGGACAATAGCACCCA
GTGGTTCCACAACGAGAGCCTGATCAGCAGCCAGGCCAGCAGCTACTTTATCGATGCCGCCACC
GTGGACGACAGCGGCGAGTACAGATGCCAGACCAATCTGAGCACCCTGAGCGACCCTGTGCAGC
TGGAAGTGCACATTGGATGGTTGCTGCTGCAAGCCCCTAGATGGGTGTTCAAAGAAGAGGACCC
CATCCACCTGAGATGCCACTCTTGGAAGAACACAGCCCTGCACAAAGTGACCTACCTGCAGAAC
GGCAAGGGCAGAAAGTACTTCCACCACAACAGCGACTTCTACATCCCCAAGGCCACACTGAAGG
ACTCCGGCTCCTACTTCTGCAGAGGCCTGGTCGGCAGCAAGAACGTGTCCAGCGAGACAGTGAA
CATCACCATCACACAGGGCCTCGCCGTGTCTACCATCAGCAGCTTTTTCCCACCTGGCTATCAG
GTGTCCTTCTGCCTGGTCATGGTGCTGCTGTTCGCCGTGGATACCGGCCTGTACTTCAGCGTCA
AGACCAACATCCGGTCCAGCACCAGAGACTGGAAGGACCACAAGTTCAAGTGGCGGAAGGACCC
TCAGGACAAGTAAGCGGCCGCGTCGAGTCTAGAGGGCCCGTTTAAACCCGCTGATCAGCCTCGA
CTGTGCCTTCTAGTTGCCAGCCATCTGTTGTTTGCCCCTCCCCCGTGCCTTCCTTGACCCTGGA
AGGTGCCACTCCCACTGTCCTTTCCTAATAAAATGAGGAAATTGCATCGCATTGTCTGAGTAGG
TGTCATTCTATTCTGGGGGGTGGGGTGGGGCAGGACAGCAAGGGGGAGGATTGGGAAGACAATA
GCAGGCATGCTGGGGATGCGGTGGGCTCTATGGATTTGGCTACAGCAACAGGGTGGTGGACCTC
ATGGCCCACATGGCCTCCAAGGAGTAAGACCCCTGGACCACCAGCCCCAGCAAGAGCACAAGAG
GAAGAGAGAGACCCTCACTGCTGGGGAGTCCCTGCCACACTCAGTCCCCCACCACACTGAATCT
CCCCTCCTCACAGTTGCCATGTAGACCCCTTGAAGAGGGGAGGGGCCTAGGGAGCCGCACCTTG
TCATGTACCATCAATAAAGTACCCTGTGCTCAACCAGTTACTTGTCCTGTCTTATTCTAGGGTC
TGGGGCAGAGGGGAGGGAAGCTGGGCTTGTGTCAAGGTGAGACATTCTTGCTGGGGAGGGACCT
GGTATGTTCTCCTCAGACTGAGGGTAGGGCCTCCAAACAGCCTTGCTTGCTTCGAGAACCATTT
GCTTCCCGCTCAGACGTCTTGAGTGCTACAGGAAGCTGGCACCACTACTTCAGAGAACAAGGCC
TTTTCCTCTCCTCGCTCCAGT
exemplary donor template for insertion at GAPDH locus
SEQ ID NO: 211
GAAGACTGTGGATGGCCCCTCCGGGAAACTGTGGCGTGATGGCCGCGGGGCTCTCCAGAACATC
ATCCCTGCCTCTACTGGCGCTGCCAAGGCTGTGGGCAAGGTCATCCCTGAGCTGAACGGGAAGC
TCACTGGCATGGCCTTCCGTGTCCCCACTGCCAACGTGTCAGTGGTGGACCTGACCTGCCGTCT
AGAAAAACCTGCCAAATATGATGACATCAAGAAGGTGGTGAAGCAGGCGTCGGAGGGCCCCCTC
AAGGGCATCCTGGGCTACACTGAGCACCAGGTGGTCTCCTCTGACTTCAACAGCGACACCCACT
CCTCCACCTTTGACGCTGGGGCTGGCATTGCCCTCAACGACCACTTTGTCAAGCTCATTTCCTG
GTATGTGGCTGGGGCCAGAGACTGGCTCTTAAAAAGTGCAGGGTCTGGCGCCCTCTGGTGGCTG
GCTCAGAAAAAGGGCCCTGACAACTCTTTACATCTTCTAGGTATGACAACGAGTTCGGATATAG
CAATAGAGTGGTCGATCTGATGGCTCATATGGCTAGCAAAGAGGGAAGCGGAGCTACTAACTTC
AGCCTGCTGAAGCAGGCTGGAGACGTGGAGGAGAACCCTGGACCTATGGATTGGACCTGGATCC
TGTTTCTGGTGGCCGCTGCCACAAGAGTGCACAGCAATTGGGTCAACGTGATCAGCGACCTGAA
GAAGATCGAGGACCTGATCCAGAGCATGCACATCGACGCCACACTGTACACCGAGTCCGATGTG
CACCCTAGCTGCAAAGTGACCGCCATGAAGTGCTTTCTGCTGGAACTGCAAGTGATCAGCCTGG
AAAGCGGCGACGCCAGCATCCACGATACCGTGGAAAACCTGATCATCCTGGCCAACAACAGCCT
GAGCAGCAACGGCAATGTGACCGAGAGCGGCTGCAAAGAGTGCGAGGAACTGGAAGAGAAGAAC
ATCAAAGAGTTCCTCCAGAGCTTCGTCCACATCGTGCAGATGTTCATCAACACCAGCGGAAGCG
GAGCCACAAACTTCTCTCTGCTGAAGCAGGCAGGAGATGTTGAAGAAAACCCTGGACCTATCAC
CTGTCCTCCACCTATGAGCGTGGAACACGCCGACATCTGGGTCAAGAGCTACAGCCTGTACAGC
AGAGAGCGGTACATCTGCAACAGCGGCTTCAAGAGAAAGGCCGGCACAAGCAGCCTGACCGAGT
GTGTGCTGAACAAGGCCACAAACGTGGCCCACTGGACCACACCTAGCCTGAAGTGCATCAGAGA
TCCCGCTCTGGTTCATCAGAGGCCTGCCCCTCCATCTACAGTGACAACAGCTGGCGTGACCCCT
CAGCCTGAGTCTCTGTCTCCATCTGGAAAAGAGCCTGCCGCCAGCTCTCCCAGCTCTAACAATA
CTGCTGCCACCACAGCCGCTATCGTGCCTGGATCTCAGCTGATGCCTAGCAAGAGCCCTAGCAC
CGGCACAACAGAGATCAGCTCTCACGAGAGCAGCCACGGAACACCTTCTCAGACCACCGCCAAG
AATTGGGAGCTGACAGCCTCTGCCTCTCATCAGCCACCTGGCGTGTACCCACAGGGCCACTCTG
ATACAACAGTGGCCATCAGCACCAGCACCGTTCTGCTGTGTGGCCTGTCTGCTGTTAGCCTGCT
GGCCTGCTACCTGAAGTCTAGACAGACACCTCCTCTGGCCAGCGTGGAAATGGAAGCCATGGAA
GCTCTGCCTGTCACATGGGGCACCAGCAGCAGAGATGAGGACCTCGAGAATTGCAGCCACCACC
TGGGAAGCGGAGCCACAAACTTCTCTCTGCTGAAGCAGGCAGGAGATGTTGAAGAAAACCCTGG
ACCTATGTGGCAGCTGTTGCTGCCGACAGCCCTCCTGTTGCTGGTCTCCGCTGGCATGAGAACC
GAGGATCTGCCTAAGGCCGTGGTGTTCCTGGAACCTCAGTGGTACAGAGTGCTGGAAAAGGACA
GCGTGACCCTGAAGTGCCAGGGCGCCTATTCTCCCGAGGACAATAGCACCCAGTGGTTCCACAA
CGAGAGCCTGATCAGCAGCCAGGCCAGCAGCTACTTTATCGATGCCGCCACCGTGGACGACAGC
GGCGAGTACAGATGCCAGACCAATCTGAGCACCCTGAGCGACCCTGTGCAGCTGGAAGTGCACA
TTGGATGGTTGCTGCTGCAAGCCCCTAGATGGGTGTTCAAAGAAGAGGACCCCATCCACCTGAG
ATGCCACTCTTGGAAGAACACAGCCCTGCACAAAGTGACCTACCTGCAGAACGGCAAGGGCAGA
AAGTACTTCCACCACAACAGCGACTTCTACATCCCCAAGGCCACACTGAAGGACTCCGGCTCCT
ACTTCTGCAGAGGCCTGGTCGGCAGCAAGAACGTGTCCAGCGAGACAGTGAACATCACCATCAC
ACAGGGCCTCGCCGTGTCTACCATCAGCAGCTTTTTCCCACCTGGCTATCAGGTGTCCTTCTGC
CTGGTCATGGTGCTGCTGTTCGCCGTGGATACCGGCCTGTACTTCAGCGTCAAGACCAACATCC
GGTCCAGCACCAGAGACTGGAAGGACCACAAGTTCAAGTGGCGGAAGGACCCTCAGGACAAGTA
AGCGGCCGCGTCGAGTCTAGAGGGCCCGTTTAAACCCGCTGATCAGCCTCGACTGTGCCTTCTA
GTTGCCAGCCATCTGTTGTTTGCCCCTCCCCCGTGCCTTCCTTGACCCTGGAAGGTGCCACTCC
CACTGTCCTTTCCTAATAAAATGAGGAAATTGCATCGCATTGTCTGAGTAGGTGTCATTCTATT
CTGGGGGGTGGGGTGGGGCAGGACAGCAAGGGGGAGGATTGGGAAGACAATAGCAGGCATGCTG
GGGATGCGGTGGGCTCTATGGATTTGGCTACAGCAACAGGGTGGTGGACCTCATGGCCCACATG
GCCTCCAAGGAGTAAGACCCCTGGACCACCAGCCCCAGCAAGAGCACAAGAGGAAGAGAGAGAC
CCTCACTGCTGGGGAGTCCCTGCCACACTCAGTCCCCCACCACACTGAATCTCCCCTCCTCACA
GTTGCCATGTAGACCCCTTGAAGAGGGGAGGGGCCTAGGGAGCCGCACCTTGTCATGTACCATC
AATAAAGTACCCTGTGCTCAACCAGTTACTTGTCCTGTCTTATTCTAGGGTCTGGGGCAGAGGG
GAGGGAAGCTGGGCTTGTGTCAAGGTGAGACATTCTTGCTGGGGAGGGACCTGGTATGTTCTCC
TCAGACTGAGGGTAGGGCCTCCAAACAGCCTTGCTTGCTTCGAGAACCATTTGCTTCCCGCTCA
GACGTCTTGAGTGCTACAGGAAGCTGGCACCACTACTTCAGAGAACAAGGCCTTTTCCTCTCCT
CGCTCCAGT
exemplary donor template for insertion at GAPDH locus
SEQ ID NO: 212
GAAGACTGTGGATGGCCCCTCCGGGAAACTGTGGCGTGATGGCCGCGGGGCTCTCCAGAACATC
ATCCCTGCCTCTACTGGCGCTGCCAAGGCTGTGGGCAAGGTCATCCCTGAGCTGAACGGGAAGC
TCACTGGCATGGCCTTCCGTGTCCCCACTGCCAACGTGTCAGTGGTGGACCTGACCTGCCGTCT
AGAAAAACCTGCCAAATATGATGACATCAAGAAGGTGGTGAAGCAGGCGTCGGAGGGCCCCCTC
AAGGGCATCCTGGGCTACACTGAGCACCAGGTGGTCTCCTCTGACTTCAACAGCGACACCCACT
CCTCCACCTTTGACGCTGGGGCTGGCATTGCCCTCAACGACCACTTTGTCAAGCTCATTTCCTG
GTATGTGGCTGGGGCCAGAGACTGGCTCTTAAAAAGTGCAGGGTCTGGCGCCCTCTGGTGGCTG
GCTCAGAAAAAGGGCCCTGACAACTCTTTACATCTTCTAGGTATGACAACGAGTTCGGATATAG
CAATAGAGTGGTCGATCTGATGGCTCATATGGCTAGCAAAGAGGGAAGCGGAGCTACTAACTTC
AGCCTGCTGAAGCAGGCTGGAGACGTGGAGGAGAACCCTGGACCTATGTGGCAGCTGTTGCTGC
CGACAGCCCTCCTGTTGCTGGTCTCCGCTGGCATGAGAACCGAGGATCTGCCTAAGGCCGTGGT
GTTCCTGGAACCTCAGTGGTACAGAGTGCTGGAAAAGGACAGCGTGACCCTGAAGTGCCAGGGC
GCCTATTCTCCCGAGGACAATAGCACCCAGTGGTTCCACAACGAGAGCCTGATCAGCAGCCAGG
CCAGCAGCTACTTTATCGATGCCGCCACCGTGGACGACAGCGGCGAGTACAGATGCCAGACCAA
TCTGAGCACCCTGAGCGACCCTGTGCAGCTGGAAGTGCACATTGGATGGTTGCTGCTGCAAGCC
CCTAGATGGGTGTTCAAAGAAGAGGACCCCATCCACCTGAGATGCCACTCTTGGAAGAACACAG
CCCTGCACAAAGTGACCTACCTGCAGAACGGCAAGGGCAGAAAGTACTTCCACCACAACAGCGA
CTTCTACATCCCCAAGGCCACACTGAAGGACTCCGGCTCCTACTTCTGCAGAGGCCTGGTCGGC
AGCAAGAACGTGTCCAGCGAGACAGTGAACATCACCATCACACAGGGCCTCGCCGTGTCTACCA
TCAGCAGCTTTTTCCCACCTGGCTATCAGGTGTCCTTCTGCCTGGTCATGGTGCTGCTGTTCGC
CGTGGATACCGGCCTGTACTTCAGCGTCAAGACCAACATCCGGTCCAGCACCAGAGACTGGAAG
GACCACAAGTTCAAGTGGCGGAAGGACCCTCAGGACAAGGGAAGCGGAGCCACAAACTTCTCTC
TGCTGAAGCAGGCAGGAGATGTTGAAGAAAACCCTGGACCTATGGATTGGACCTGGATCCTGTT
TCTGGTGGCCGCTGCCACAAGAGTGCACAGCAATTGGGTCAACGTGATCAGCGACCTGAAGAAG
ATCGAGGACCTGATCCAGAGCATGCACATCGACGCCACACTGTACACCGAGTCCGATGTGCACC
CTAGCTGCAAAGTGACCGCCATGAAGTGCTTTCTGCTGGAACTGCAAGTGATCAGCCTGGAAAG
CGGCGACGCCAGCATCCACGATACCGTGGAAAACCTGATCATCCTGGCCAACAACAGCCTGAGC
AGCAACGGCAATGTGACCGAGAGCGGCTGCAAAGAGTGCGAGGAACTGGAAGAGAAGAACATCA
AAGAGTTCCTCCAGAGCTTCGTCCACATCGTGCAGATGTTCATCAACACCAGCTCTGGCGGAGG
AAGCGGAGGCGGAGGATCTGGTGGTGGTGGATCTGGCGGCGGTGGTAGTGGCGGAGGTTCTCTG
CAAATCACCTGTCCTCCACCTATGAGCGTGGAACACGCCGACATCTGGGTCAAGAGCTACAGCC
TGTACAGCAGAGAGCGGTACATCTGCAACAGCGGCTTCAAGAGAAAGGCCGGCACAAGCAGCCT
GACCGAGTGTGTGCTGAACAAGGCCACAAACGTGGCCCACTGGACCACACCTAGCCTGAAGTGC
ATCAGAGATCCCGCTCTGGTTCATCAGAGGCCTGCCCCTCCATCTACAGTGACAACAGCTGGCG
TGACCCCTCAGCCTGAGTCTCTGTCTCCATCTGGAAAAGAGCCTGCCGCCAGCTCTCCCAGCTC
TAACAATACTGCTGCCACCACAGCCGCTATCGTGCCTGGATCTCAGCTGATGCCTAGCAAGAGC
CCTAGCACCGGCACAACAGAGATCAGCTCTCACGAGAGCAGCCACGGAACACCTTCTCAGACCA
CCGCCAAGAATTGGGAGCTGACAGCCTCTGCCTCTCATCAGCCACCTGGCGTGTACCCACAGGG
CCACTCTGATACAACAGTGGCCATCAGCACCAGCACCGTTCTGCTGTGTGGCCTGTCTGCTGTT
AGCCTGCTGGCCTGCTACCTGAAGTCTAGACAGACACCTCCTCTGGCCAGCGTGGAAATGGAAG
CCATGGAAGCTCTGCCTGTCACATGGGGCACCAGCAGCAGAGATGAGGACCTCGAGAATTGCAG
CCACCACCTGTAAGCGGCCGCGTCGAGTCTAGAGGGCCCGTTTAAACCCGCTGATCAGCCTCGA
CTGTGCCTTCTAGTTGCCAGCCATCTGTTGTTTGCCCCTCCCCCGTGCCTTCCTTGACCCTGGA
AGGTGCCACTCCCACTGTCCTTTCCTAATAAAATGAGGAAATTGCATCGCATTGTCTGAGTAGG
TGTCATTCTATTCTGGGGGGTGGGGTGGGGCAGGACAGCAAGGGGGAGGATTGGGAAGACAATA
GCAGGCATGCTGGGGATGCGGTGGGCTCTATGGATTTGGCTACAGCAACAGGGTGGTGGACCTC
ATGGCCCACATGGCCTCCAAGGAGTAAGACCCCTGGACCACCAGCCCCAGCAAGAGCACAAGAG
GAAGAGAGAGACCCTCACTGCTGGGGAGTCCCTGCCACACTCAGTCCCCCACCACACTGAATCT
CCCCTCCTCACAGTTGCCATGTAGACCCCTTGAAGAGGGGAGGGGCCTAGGGAGCCGCACCTTG
TCATGTACCATCAATAAAGTACCCTGTGCTCAACCAGTTACTTGTCCTGTCTTATTCTAGGGTC
TGGGGCAGAGGGGAGGGAAGCTGGGCTTGTGTCAAGGTGAGACATTCTTGCTGGGGAGGGACCT
GGTATGTTCTCCTCAGACTGAGGGTAGGGCCTCCAAACAGCCTTGCTTGCTTCGAGAACCATTT
GCTTCCCGCTCAGACGTCTTGAGTGCTACAGGAAGCTGGCACCACTACTTCAGAGAACAAGGCC
TTTTCCTCTCCTCGCTCCAGT
exemplary donor template for insertion at GAPDH locus
SEQ ID NO: 213
GAAGACTGTGGATGGCCCCTCCGGGAAACTGTGGCGTGATGGCCGCGGGGCTCTCCAGAACATC
ATCCCTGCCTCTACTGGCGCTGCCAAGGCTGTGGGCAAGGTCATCCCTGAGCTGAACGGGAAGC
TCACTGGCATGGCCTTCCGTGTCCCCACTGCCAACGTGTCAGTGGTGGACCTGACCTGCCGTCT
AGAAAAACCTGCCAAATATGATGACATCAAGAAGGTGGTGAAGCAGGCGTCGGAGGGCCCCCTC
AAGGGCATCCTGGGCTACACTGAGCACCAGGTGGTCTCCTCTGACTTCAACAGCGACACCCACT
CCTCCACCTTTGACGCTGGGGCTGGCATTGCCCTCAACGACCACTTTGTCAAGCTCATTTCCTG
GTATGTGGCTGGGGCCAGAGACTGGCTCTTAAAAAGTGCAGGGTCTGGCGCCCTCTGGTGGCTG
GCTCAGAAAAAGGGCCCTGACAACTCTTTACATCTTCTAGGTATGACAACGAGTTCGGATATAG
CAATAGAGTGGTCGATCTGATGGCTCATATGGCTAGCAAAGAGGGAAGCGGAGCTACTAACTTC
AGCCTGCTGAAGCAGGCTGGAGACGTGGAGGAGAACCCTGGACCTATGTGGCAGCTGTTGCTGC
CGACAGCCCTCCTGTTGCTGGTCTCCGCTGGCATGAGAACCGAGGATCTGCCTAAGGCCGTGGT
GTTCCTGGAACCTCAGTGGTACAGAGTGCTGGAAAAGGACAGCGTGACCCTGAAGTGCCAGGGC
GCCTATTCTCCCGAGGACAATAGCACCCAGTGGTTCCACAACGAGAGCCTGATCAGCAGCCAGG
CCAGCAGCTACTTTATCGATGCCGCCACCGTGGACGACAGCGGCGAGTACAGATGCCAGACCAA
TCTGAGCACCCTGAGCGACCCTGTGCAGCTGGAAGTGCACATTGGATGGTTGCTGCTGCAAGCC
CCTAGATGGGTGTTCAAAGAAGAGGACCCCATCCACCTGAGATGCCACTCTTGGAAGAACACAG
CCCTGCACAAAGTGACCTACCTGCAGAACGGCAAGGGCAGAAAGTACTTCCACCACAACAGCGA
CTTCTACATCCCCAAGGCCACACTGAAGGACTCCGGCTCCTACTTCTGCAGAGGCCTGGTCGGC
AGCAAGAACGTGTCCAGCGAGACAGTGAACATCACCATCACACAGGGCCTCGCCGTGTCTACCA
TCAGCAGCTTTTTCCCACCTGGCTATCAGGTGTCCTTCTGCCTGGTCATGGTGCTGCTGTTCGC
CGTGGATACCGGCCTGTACTTCAGCGTCAAGACCAACATCCGGTCCAGCACCAGAGACTGGAAG
GACCACAAGTTCAAGTGGCGGAAGGACCCTCAGGACAAGGGAAGCGGAGCCACAAACTTCTCTC
TGCTGAAGCAGGCAGGAGATGTTGAAGAAAACCCTGGACCTATGGATTGGACCTGGATCCTGTT
TCTGGTGGCCGCTGCCACAAGAGTGCACAGCAATTGGGTCAACGTGATCAGCGACCTGAAGAAG
ATCGAGGACCTGATCCAGAGCATGCACATCGACGCCACACTGTACACCGAGTCCGATGTGCACC
CTAGCTGCAAAGTGACCGCCATGAAGTGCTTTCTGCTGGAACTGCAAGTGATCAGCCTGGAAAG
CGGCGACGCCAGCATCCACGATACCGTGGAAAACCTGATCATCCTGGCCAACAACAGCCTGAGC
AGCAACGGCAATGTGACCGAGAGCGGCTGCAAAGAGTGCGAGGAACTGGAAGAGAAGAACATCA
AAGAGTTCCTCCAGAGCTTCGTCCACATCGTGCAGATGTTCATCAACACCAGCTCTGGCGGAGG
AAGCGGAGGCGGAGGATCTGGTGGTGGTGGATCTGGCGGCGGTGGTAGTGGCGGAGGTTCTCTG
CAAATCACCTGTCCTCCACCTATGAGCGTGGAACACGCCGACATCTGGGTCAAGAGCTACAGCC
TGTACAGCAGAGAGCGGTACATCTGCAACAGCGGCTTCAAGAGAAAGGCCGGCACAAGCAGCCT
GACCGAGTGTGTGCTGAACAAGGCCACAAACGTGGCCCACTGGACCACACCTAGCCTGAAGTGC
ATCAGAGATCCCGCTCTGGTTCATCAGAGGCCTGCCCCTCCATCTACAGTGACAACAGCTGGCG
TGACCCCTCAGCCTGAGTCTCTGTCTCCATCTGGAAAAGAGCCTGCCGCCAGCTCTCCCAGCTC
TAACAATACTGCTGCCACCACAGCCGCTATCGTGCCTGGATCTCAGCTGATGCCTAGCAAGAGC
CCTAGCACCGGCACAACAGAGATCAGCTCTCACGAGAGCAGCCACGGAACACCTTCTCAGACCA
CCGCCAAGAATTGGGAGCTGACAGCCTCTGCCTCTCATCAGCCACCTGGCGTGTACCCACAGGG
CCACTCTGATACAACAGTGGCCATCAGCACCAGCACCGTTCTGCTGTGTGGCCTGTCTGCTGTT
AGCCTGCTGGCCTGCTACCTGAAGTCTAGACAGACACCTCCTCTGGCCAGCGTGGAAATGGAAG
CCATGGAAGCTCTGCCTGTCACATGGGGCACCAGCAGCAGAGATGAGGACCTCGAGAATTGCAG
CCACCACCTGTAAGCGGCCGCGTCGAGTCTAGAGGGCCCGTTTAAACCCGCTGATCAGCCTCGA
CTGTGCCTTCTAGTTGCCAGCCATCTGTTGTTTGCCCCTCCCCCGTGCCTTCCTTGACCCTGGA
AGGTGCCACTCCCACTGTCCTTTCCTAATAAAATGAGGAAATTGCATCGCATTGTCTGAGTAGG
TGTCATTCTATTCTGGGGGGTGGGGTGGGGCAGGACAGCAAGGGGGAGGATTGGGAAGACAATA
GCAGGCATGCTGGGGATGCGGTGGGCTCTATGGATTTGGCTACAGCAACAGGGTGGTGGACCTC
ATGGCCCACATGGCCTCCAAGGAGTAAGACCCCTGGACCACCAGCCCCAGCAAGAGCACAAGAG
GAAGAGAGAGACCCTCACTGCTGGGGAGTCCCTGCCACACTCAGTCCCCCACCACACTGAATCT
CCCCTCCTCACAGTTGCCATGTAGACCCCTTGAAGAGGGGAGGGGCCTAGGGAGCCGCACCTTG
TCATGTACCATCAATAAAGTACCCTGTGCTCAACCAGTTACTTGTCCTGTCTTATTCTAGGGTC
TGGGGCAGAGGGGAGGGAAGCTGGGCTTGTGTCAAGGTGAGACATTCTTGCTGGGGAGGGACCT
GGTATGTTCTCCTCAGACTGAGGGTAGGGCCTCCAAACAGCCTTGCTTGCTTCGAGAACCATTT
GCTTCCCGCTCAGACGTCTTGAGTGCTACAGGAAGCTGGCACCACTACTTCAGAGAACAAGGCC
TTTTCCTCTCCTCGCTCCAGT
exemplary donor template for insertion at GAPDH locus
SEQ ID NO: 214
GAAGACTGTGGATGGCCCCTCCGGGAAACTGTGGCGTGATGGCCGCGGGGCTCTCCAGAACATC
ATCCCTGCCTCTACTGGCGCTGCCAAGGCTGTGGGCAAGGTCATCCCTGAGCTGAACGGGAAGC
TCACTGGCATGGCCTTCCGTGTCCCCACTGCCAACGTGTCAGTGGTGGACCTGACCTGCCGTCT
AGAAAAACCTGCCAAATATGATGACATCAAGAAGGTGGTGAAGCAGGCGTCGGAGGGCCCCCTC
AAGGGCATCCTGGGCTACACTGAGCACCAGGTGGTCTCCTCTGACTTCAACAGCGACACCCACT
CCTCCACCTTTGACGCTGGGGCTGGCATTGCCCTCAACGACCACTTTGTCAAGCTCATTTCCTG
GTATGTGGCTGGGGCCAGAGACTGGCTCTTAAAAAGTGCAGGGTCTGGCGCCCTCTGGTGGCTG
GCTCAGAAAAAGGGCCCTGACAACTCTTTACATCTTCTAGGTATGACAACGAGTTCGGATATAG
CAATAGAGTGGTCGATCTGATGGCTCATATGGCTAGCAAAGAGGGAAGCGGAGCTACTAACTTC
AGCCTGCTGAAGCAGGCTGGAGACGTGGAGGAGAACCCTGGACCTATGTCAAATATTACAGATC
CACAGATGTGGGATTTTGATGATCTAAATTTCACTGGCATGCCACCTGCAGATGAAGATTACAG
CCCCTGTATGCTAGAAACTGAGACACTCAACAAGTATGTTGTGATCATCGCCTATGCCCTAGTG
TTCCTGCTGAGCCTGCTGGGAAACTCCCTGGTGATGCTGGTCATCITATACAGCAGGGTCGGCC
GCTCCGTCACTGATGTCTACCTGCTGAACCTGGCCTTGGCCGACCTACTCTTTGCCCTGACCTT
GCCCATCTGGGCCGCCTCCAAGGTGAATGGCTGGATTTTTGGCACATTCCTGTGCAAGGTGGTC
TCACTCCTGAAGGAAGTCAACTTCTACAGTGGCATCCTGCTGTTGGCCTGCATCAGTGTGGACC
GTTACCTGGCCATTGTCCATGCCACACGCACACTGACCCAGAAGCGTCACTTGGTCAAGTTTGT
TTGTCTTGGCTGCTGGGGACTGTCTATGAATCTGTCCCTGCCCTTCTTCCTTTTCCGCCAGGCT
TACCATCCAAACAATTCCAGTCCAGTTTGCTATGAGGTCCTGGGAAATGACACAGCAAAATGGC
GGATGGTGTTGCGGATCCTGCCTCACACCTTTGGCTTCATCGTGCCGCTGTTTGTCATGCTGTT
CTGCTATGGATTCACCCTGCGTACACTGTTTAAGGCCCACATGGGGCAGAAGCACCGAGCCATG
AGGGTCATCTTTGCTGTCGTCCTCATCTTCCTGCTTTGCTGGCTGCCCTACAACCTGGTCCTGC
TGGCAGACACCCTCATGAGGACCCAGGTGATCCAGGAGAGCTGTGAGCGCCGCAACAACATCGG
CCGGGCCCTGGATGCCACTGAGATTCTGGGATTTCTCCATAGCTGCCTCAACCCCATCATCTAC
GCCTTCATCGGCCAAAATTTTCGCCATGGATTCCTCAAGATCCTGGCTATGCATGGCCTGGTCA
GCAAGGAGTTCTTGGCACGTCATCGTGTTACCTCCTACACTTCTTCGTCTGTCAATGTCTCTTC
CAACCTCTGAATTTGGCTACAGCAACAGGGTGGTGGACCTCATGGCCCACATGGCCTCCAAGGA
GTAAGACCCCTGGACCACCAGCCCCAGCAAGAGCACAAGAGGAAGAGAGAGACCCTCACTGCTG
GGGAGTCCCTGCCACACTCAGTCCCCCACCACACTGAATCTCCCCTCCTCACAGTTGCCATGTA
GACCCCTTGAAGAGGGGAGGGGCCTAGGGAGCCGCACCTTGTCATGTACCATCAATAAAGTACC
CTGTGCTCAACCAGTTACTTGTCCTGTCTTATTCTAGGGTCTGGGGCAGAGGGGAGGGAAGCTG
GGCTTGTGTCAAGGTGAGACATTCTTGCTGGGGAGGGACCTGGTATGTTCTCCTCAGACTGAGG
GTAGGGCCTCCAAACAGCCTTGCTTGCTTCGAGAACCATTTGCTTCCCGCTCAGACGTCTTGAG
TGCTACAGGAAGCTGGCACCACTACTTCAGAGAACAAGGCCTTTTCCTCTCCTCGCTCCAGT
exemplary donor template for insertion at GAPDH locus
SEQ ID NO: 215
GAAGACTGTGGATGGCCCCTCCGGGAAACTGTGGCGTGATGGCCGCGGGGCTCTCCAGAACATC
ATCCCTGCCTCTACTGGCGCTGCCAAGGCTGTGGGCAAGGTCATCCCTGAGCTGAACGGGAAGC
TCACTGGCATGGCCTTCCGTGTCCCCACTGCCAACGTGTCAGTGGTGGACCTGACCTGCCGTCT
AGAAAAACCTGCCAAATATGATGACATCAAGAAGGTGGTGAAGCAGGCGTCGGAGGGCCCCCTC
AAGGGCATCCTGGGCTACACTGAGCACCAGGTGGTCTCCTCTGACTTCAACAGCGACACCCACT
CCTCCACCTTTGACGCTGGGGCTGGCATTGCCCTCAACGACCACTTTGTCAAGCTCATTTCCTG
GTATGTGGCTGGGGCCAGAGACTGGCTCTTAAAAAGTGCAGGGTCTGGCGCCCTCTGGTGGCTG
GCTCAGAAAAAGGGCCCTGACAACTCTTTACATCTTCTAGGTATGACAACGAGTTCGGATATAG
CAATAGAGTGGTCGATCTGATGGCTCATATGGCTAGCAAAGAGGGAAGCGGAGCTACTAACTTC
AGCCTGCTGAAGCAGGCTGGAGACGTGGAGGAGAACCCTGGACCTATGGAGTTGAGGAAGTACG
GCCCTGGAAGACTGGCGGGGACAGTTATAGGAGGAGCTGCTCAGAGTAAATCACAGACTAAATC
AGACTCAATCACAAAAGAGTTCCTGCCAGGCCTTTACACAGCCCCTTCCTCCCCGTTCCCGCCC
TCACAGGTGAGTGACCACCAAGTGCTAAATGACGCCGAGGTTGCCGCCCTCCTGGAGAACTTCA
GCTCTTCCTATGACTATGGAGAAAACGAGAGTGACTCGTGCTGTACCTCCCCGCCCTGCCCACA
GGACTTCAGCCTGAACTTCGACCGGGCCTTCCTGCCAGCCCTCTACAGCCTCCTCTTTCTGCTG
GGGCTGCTGGGCAACGGCGCGGTGGCAGCCGTGCTGCTGAGCCGGCGGACAGCCCTGAGCAGCA
CCGACACCTTCCTGCTCCACCTAGCTGTAGCAGACACGCTGCTGGTGCTGACACTGCCGCTCTG
GGCAGTGGACGCTGCCGTCCAGTGGGTCTTTGGCTCTGGCCTCTGCAAAGTGGCAGGTGCCCTC
TTCAACATCAACTTCTACGCAGGAGCCCTCCTGCTGGCCTGCATCAGCTTTGACCGCTACCTGA
ACATAGTTCATGCCACCCAGCTCTACCGCCGGGGGCCCCCGGCCCGCGTGACCCTCACCTGCCT
GGCTGTCTGGGGGCTCTGCCTGCTTTTCGCCCTCCCAGACTTCATCTTCCTGTCGGCCCACCAC
GACGAGCGCCTCAACGCCACCCACTGCCAATACAACTTCCCACAGGTGGGCCGCACGGCTCTGC
GGGTGCTGCAGCTGGTGGCTGGCTTTCTGCTGCCCCTGCTGGTCATGGCCTACTGCTATGCCCA
CATCCTGGCCGTGCTGCTGGTTTCCAGGGGCCAGCGGCGCCTGCGGGCCATGCGGCTGGTGGTG
GTGGTCGTGGTGGCCTTTGCCCTCTGCTGGACCCCCTATCACCTGGTGGTGCTGGTGGACATCC
TCATGGACCTGGGCGCTTTGGCCCGCAACTGTGGCCGAGAAAGCAGGGTAGACGTGGCCAAGTC
GGTCACCTCAGGCCTGGGCTACATGCACTGCTGCCTCAACCCGCTGCTCTATGCCTTTGTAGGG
GTCAAGTTCCGGGAGCGGATGTGGATGCTGCTCTTGCGCCTGGGCTGCCCCAACCAGAGAGGGC
TCCAGAGGCAGCCATCGTCTTCCCGCCGGGATTCATCCTGGTCTGAGACCTCAGAGGCCTCCTA
CTCGGGCTTGTGAATTTGGCTACAGCAACAGGGTGGTGGACCTCATGGCCCACATGGCCTCCAA
GGAGTAAGACCCCTGGACCACCAGCCCCAGCAAGAGCACAAGAGGAAGAGAGAGACCCTCACTG
CTGGGGAGTCCCTGCCACACTCAGTCCCCCACCACACTGAATCTCCCCTCCTCACAGTTGCCAT
GTAGACCCCTTGAAGAGGGGAGGGGCCTAGGGAGCCGCACCTTGTCATGTACCATCAATAAAGT
ACCCTGTGCTCAACCAGTTACTTGTCCTGTCTTATTCTAGGGTCTGGGGCAGAGGGGAGGGAAG
CTGGGCTTGTGTCAAGGTGAGACATTCTTGCTGGGGAGGGACCTGGTATGTTCTCCTCAGACTG
AGGGTAGGGCCTCCAAACAGCCTTGCTTGCTTCGAGAACCATTTGCTTCCCGCTCAGACGTCTT
GAGTGCTACAGGAAGCTGGCACCACTACTTCAGAGAACAAGGCCTTTTCCTCTCCTCGCTCCAG
T
exemplary donor template for insertion at GAPDH locus
SEQ ID NO: 216
GAAGACTGTGGATGGCCCCTCCGGGAAACTGTGGCGTGATGGCCGCGGGGCTCTCCAGAACATC
ATCCCTGCCTCTACTGGCGCTGCCAAGGCTGTGGGCAAGGTCATCCCTGAGCTGAACGGGAAGC
TCACTGGCATGGCCTTCCGTGTCCCCACTGCCAACGTGTCAGTGGTGGACCTGACCTGCCGTCT
AGAAAAACCTGCCAAATATGATGACATCAAGAAGGTGGTGAAGCAGGCGTCGGAGGGCCCCCTC
AAGGGCATCCTGGGCTACACTGAGCACCAGGTGGTCTCCTCTGACTTCAACAGCGACACCCACT
CCTCCACCTTTGACGCTGGGGCTGGCATTGCCCTCAACGACCACTTTGTCAAGCTCATTTCCTG
GTATGTGGCTGGGGCCAGAGACTGGCTCTTAAAAAGTGCAGGGTCTGGCGCCCTCTGGTGGCTG
GCTCAGAAAAAGGGCCCTGACAACTCTTTACATCTTCTAGGTATGACAACGAGTTCGGATATAG
CAATAGAGTGGTCGATCTGATGGCTCATATGGCTAGCAAAGAGGGAAGCGGAGCTACTAACTTC
AGCCTGCTGAAGCAGGCTGGAGACGTGGAGGAGAACCCTGGACCTATGGTCCTTGAGGTGAGTG
ACCACCAAGTGCTAAATGACGCCGAGGTTGCCGCCCTCCTGGAGAACTTCAGCTCTTCCTATGA
CTATGGAGAAAACGAGAGTGACTCGTGCTGTACCTCCCCGCCCTGCCCACAGGACTTCAGCCTG
AACTTCGACCGGGCCTTCCTGCCAGCCCTCTACAGCCTCCTCTTTCTGCTGGGGCTGCTGGGCA
ACGGCGCGGTGGCAGCCGTGCTGCTGAGCCGGCGGACAGCCCTGAGCAGCACCGACACCTTCCT
GCTCCACCTAGCTGTAGCAGACACGCTGCTGGTGCTGACACTGCCGCTCTGGGCAGTGGACGCT
GCCGTCCAGTGGGTCTTTGGCTCTGGCCTCTGCAAAGTGGCAGGTGCCCTCTTCAACATCAACT
TCTACGCAGGAGCCCTCCTGCTGGCCTGCATCAGCTTTGACCGCTACCTGAACATAGTTCATGC
CACCCAGCTCTACCGCCGGGGGCCCCCGGCCCGCGTGACCCTCACCTGCCTGGCTGTCTGGGGG
CTCTGCCTGCTTTTCGCCCTCCCAGACTTCATCTTCCTGTCGGCCCACCACGACGAGCGCCTCA
ACGCCACCCACTGCCAATACAACTTCCCACAGGTGGGCCGCACGGCTCTGCGGGTGCTGCAGCT
GGTGGCTGGCTTTCTGCTGCCCCTGCTGGTCATGGCCTACTGCTATGCCCACATCCTGGCCGTG
CTGCTGGTTTCCAGGGGCCAGCGGCGCCTGCGGGCCATGCGGCTGGTGGTGGTGGTCGTGGTGG
CCTTTGCCCTCTGCTGGACCCCCTATCACCTGGTGGTGCTGGTGGACATCCTCATGGACCTGGG
CGCTTTGGCCCGCAACTGTGGCCGAGAAAGCAGGGTAGACGTGGCCAAGTCGGTCACCTCAGGC
CTGGGCTACATGCACTGCTGCCTCAACCCGCTGCTCTATGCCTTTGTAGGGGTCAAGTTCCGGG
AGCGGATGTGGATGCTGCTCTTGCGCCTGGGCTGCCCCAACCAGAGAGGGCTCCAGAGGCAGCC
ATCGTCTTCCCGCCGGGATTCATCCTGGTCTGAGACCTCAGAGGCCTCCTACTCGGGCTTGTGA
ATTTGGCTACAGCAACAGGGTGGTGGACCTCATGGCCCACATGGCCTCCAAGGAGTAAGACCCC
TGGACCACCAGCCCCAGCAAGAGCACAAGAGGAAGAGAGAGACCCTCACTGCTGGGGAGTCCCT
GCCACACTCAGTCCCCCACCACACTGAATCTCCCCTCCTCACAGTTGCCATGTAGACCCCTTGA
AGAGGGGAGGGGCCTAGGGAGCCGCACCTTGTCATGTACCATCAATAAAGTACCCTGTGCTCAA
CCAGTTACTTGTCCTGTCTTATTCTAGGGTCTGGGGCAGAGGGGAGGGAAGCTGGGCTTGTGTC
AAGGTGAGACATTCTTGCTGGGGAGGGACCTGGTATGTTCTCCTCAGACTGAGGGTAGGGCCTC
CAAACAGCCTTGCTTGCTTCGAGAACCATTTGCTTCCCGCTCAGACGTCTTGAGTGCTACAGGA
AGCTGGCACCACTACTTCAGAGAACAAGGCCTTTTCCTCTCCTCGCTCCAGT
exemplary donor template for insertion at GAPDH locus
SEQ ID NO: 217
GAAGACTGTGGATGGCCCCTCCGGGAAACTGTGGCGTGATGGCCGCGGGGCTCTCCAGAACATC
ATCCCTGCCTCTACTGGCGCTGCCAAGGCTGTGGGCAAGGTCATCCCTGAGCTGAACGGGAAGC
TCACTGGCATGGCCTTCCGTGTCCCCACTGCCAACGTGTCAGTGGTGGACCTGACCTGCCGTCT
AGAAAAACCTGCCAAATATGATGACATCAAGAAGGTGGTGAAGCAGGCGTCGGAGGGCCCCCTC
AAGGGCATCCTGGGCTACACTGAGCACCAGGTGGTCTCCTCTGACTTCAACAGCGACACCCACT
CCTCCACCTTTGACGCTGGGGCTGGCATTGCCCTCAACGACCACTTTGTCAAGCTCATTTCCTG
GTATGTGGCTGGGGCCAGAGACTGGCTCTTAAAAAGTGCAGGGTCTGGCGCCCTCTGGTGGCTG
GCTCAGAAAAAGGGCCCTGACAACTCTTTACATCTTCTAGGTATGACAACGAGTTCGGATATAG
CAATAGAGTGGTCGATCTGATGGCTCATATGGCTAGCAAAGAGGGAAGCGGAGCTACTAACTTC
AGCCTGCTGAAGCAGGCTGGAGACGTGGAGGAGAACCCTGGACCTATGGATTATCAAGTGTCAA
GTCCAATCTATGACATCAATTATTATACATCGGAGCCCTGCCAAAAAATCAATGTGAAGCAAAT
CGCAGCCCGCCTCCTGCCTCCGCTCTACTCACTGGTGTTCATCTTTGGTTTTGTGGGCAACATG
CTGGTCATCCTCATCCTGATAAACTGCAAAAGGCTGAAGAGCATGACTGACATCTACCTGCTCA
ACCTGGCCATCTCTGACCTGTTTTTCCTTCTTACTGTCCCCTTCTGGGCTCACTATGCTGCCGC
CCAGTGGGACTTTGGAAATACAATGTGTCAACTCTTGACAGGGCTCTATTTTATAGGCTTCTTC
TCTGGAATCTTCTTCATCATCCTCCTGACAATCGATAGGTACCTGGCTGTCGTCCATGCTGTGT
TTGCTTTAAAAGCCAGGACGGTCACCTTTGGGGTGGTGACAAGTGTGATCACTTGGGTGGTGGC
TGTGTTTGCGTCTCTCCCAGGAATCATCTTTACCAGATCTCAAAAAGAAGGTCTTCATTACACC
TGCAGCTCTCATTTTCCATACAGTCAGTATCAATTCTGGAAGAATTTCCAGACATTAAAGATAG
TCATCTTGGGGCTGGTCCTGCCGCTGCTTGTCATGGTCATCTGCTACTCGGGAATCCTAAAAAC
TCTGCTTCGGTGTCGAAATGAGAAGAAGAGGCACAGGGCTGTGAGGCTTATCTTCACCATCATG
ATTGTTTATTTTCTCTTCTGGGCTCCCTACAACATTGTCCTTCTCCTGAACACCTTCCAGGAAT
TCTTTGGCCTGAATAATTGCAGTAGCTCTAACAGGTTGGACCAAGCTATGCAGGTGACAGAGAC
TCTTGGGATGACGCACTGCTGCATCAACCCCATCATCTATGCCTTTGTCGGGGAGAAGTTCAGA
AACTACCTCTTAGTCTTCTTCCAAAAGCACATTGCCAAACGCTTCTGCAAATGCTGTTCTATTT
TCCAGCAAGAGGCTCCCGAGCGAGCAAGCTCAGTTTACACCCGATCCACTGGGGAGCAGGAAAT
ATCTGTGGGCTTGTGAATTTGGCTACAGCAACAGGGTGGTGGACCTCATGGCCCACATGGCCTC
CAAGGAGTAAGACCCCTGGACCACCAGCCCCAGCAAGAGCACAAGAGGAAGAGAGAGACCCTCA
CTGCTGGGGAGTCCCTGCCACACTCAGTCCCCCACCACACTGAATCTCCCCTCCTCACAGTTGC
CATGTAGACCCCTTGAAGAGGGGAGGGGCCTAGGGAGCCGCACCTTGTCATGTACCATCAATAA
AGTACCCTGTGCTCAACCAGTTACTTGTCCTGTCTTATTCTAGGGTCTGGGGCAGAGGGGAGGG
AAGCTGGGCTTGTGTCAAGGTGAGACATTCTTGCTGGGGAGGGACCTGGTATGTTCTCCTCAGA
CTGAGGGTAGGGCCTCCAAACAGCCTTGCTTGCTTCGAGAACCATTTGCTTCCCGCTCAGACGT
CTTGAGTGCTACAGGAAGCTGGCACCACTACTTCAGAGAACAAGGCCTTTTCCTCTCCTCGCTC
CAGT
exemplary donor template for insertion at GAPDH locus
SEQ ID NO: 218
GAAGACTGTGGATGGCCCCTCCGGGAAACTGTGGCGTGATGGCCGCGGGGCTCTCCAGAACATC
ATCCCTGCCTCTACTGGCGCTGCCAAGGCTGTGGGCAAGGTCATCCCTGAGCTGAACGGGAAGC
TCACTGGCATGGCCTTCCGTGTCCCCACTGCCAACGTGTCAGTGGTGGACCTGACCTGCCGTCT
AGAAAAACCTGCCAAATATGATGACATCAAGAAGGTGGTGAAGCAGGCGTCGGAGGGCCCCCTC
AAGGGCATCCTGGGCTACACTGAGCACCAGGTGGTCTCCTCTGACTTCAACAGCGACACCCACT
CCTCCACCTTTGACGCTGGGGCTGGCATTGCCCTCAACGACCACTTTGTCAAGCTCATTTCCTG
GTATGTGGCTGGGGCCAGAGACTGGCTCTTAAAAAGTGCAGGGTCTGGCGCCCTCTGGTGGCTG
GCTCAGAAAAAGGGCCCTGACAACTCTTTACATCTTCTAGGTATGACAACGAGTTCGGATATAG
CAATAGAGTGGTCGATCTGATGGCTCATATGGCTAGCAAAGAGGGAAGCGGAGCTACTAACTTC
AGCCTGCTGAAGCAGGCTGGAGACGTGGAGGAGAACCCTGGACCTATGCTGTCCACATCTCGTT
CTCGGTTTATCAGAAATACCAACGAGAGCGGTGAAGAAGTCACCACCTTTTTTGATTATGATTA
CGGTGCTCCCTGTCATAAATTTGACGTGAAGCAAATTGGGGCCCAACTCCTGCCTCCGCTCTAC
TCGCTGGTGTTCATCTTTGGTTTTGTGGGCAACATGCTGGTCGTCCTCATCTTAATAAACTGCA
AAAAGCTGAAGTGCTTGACTGACATTTACCTGCTCAACCTGGCCATCTCTGATCTGCTTTTTCT
TATTACTCTCCCATTGTGGGCTCACTCTGCTGCAAATGAGTGGGTCTTTGGGAATGCAATGTGC
AAATTATTCACAGGGCTGTATCACATCGGTTATTTTGGCGGAATCTTCTTCATCATCCTCCTGA
CAATCGATAGATACCTGGCTATTGTCCATGCTGTGTTTGCTTTAAAAGCCAGGACGGTCACCTT
TGGGGTGGTGACAAGTGTGATCACCTGGTTGGTGGCTGTGTTTGCTTCTGTCCCAGGAATCATC
TTTACTAAATGCCAGAAAGAAGATTCTGTTTATGTCTGTGGCCCTTATTTTCCACGAGGATGGA
ATAATTTCCACACAATAATGAGGAACATTTTGGGGCTGGTCCTGCCGCTGCTCATCATGGTCAT
CTGCTACTCGGGAATCCTGAAAACCCTGCTTCGGTGTCGAAACGAGAAGAAGAGGCATAGGGCA
GTGAGAGTCATCTTCACCATCATGATTGTTTACTTTCTCTTCTGGACTCCCTATAATATTGTCA
TTCTCCTGAACACCTTCCAGGAATTCTTCGGCCTGAGTAACTGTGAAAGCACCAGTCAACTGGA
CCAAGCCACGCAGGTGACAGAGACTCTTGGGATGACTCACTGCTGCATCAATCCCATCATCTAT
GCCTTCGTTGGGGAGAAGTTCAGAAGCCTTTTTCACATAGCTCTTGGCTGTAGGATTGCCCCAC
TCCAAAAACCAGTGTGTGGAGGTCCAGGAGTGAGACCAGGAAAGAATGTGAAAGTGACTACACA
AGGACTCCTCGATGGTCGTGGAAAAGGAAAGTCAATTGGCAGAGCCCCTGAAGCCAGTCTTCAG
GACAAAGAAGGAGCCTAGATTTGGCTACAGCAACAGGGTGGTGGACCTCATGGCCCACATGGCC
TCCAAGGAGTAAGACCCCTGGACCACCAGCCCCAGCAAGAGCACAAGAGGAAGAGAGAGACCCT
CACTGCTGGGGAGTCCCTGCCACACTCAGTCCCCCACCACACTGAATCTCCCCTCCTCACAGTT
GCCATGTAGACCCCTTGAAGAGGGGAGGGGCCTAGGGAGCCGCACCTTGTCATGTACCATCAAT
AAAGTACCCTGTGCTCAACCAGTTACTTGTCCTGTCTTATTCTAGGGTCTGGGGCAGAGGGGAG
GGAAGCTGGGCTTGTGTCAAGGTGAGACATTCTTGCTGGGGAGGGACCTGGTATGTTCTCCTCA
GACTGAGGGTAGGGCCTCCAAACAGCCTTGCTTGCTTCGAGAACCATTTGCTTCCCGCTCAGAC
GTCTTGAGTGCTACAGGAAGCTGGCACCACTACTTCAGAGAACAAGGCCTTTTCCTCTCCTCGC
TCCAGT

### Methods of Editing the Genome of a Cell for Gain-of-Function Modifications

[0306] In one aspect, the present disclosure provides methods of editing the genome of a cell, e.g., a primary cell, e.g., without the use of a viral vector, e.g., AAV. The use of non-viral DNA templates have been shown to be more toxic and/or less efficient at knock-in than AAV6, limiting their potential (see, e.g., Roth et al., Nature 559, 405-409 (2018); Nguyen et al., Nat Biotechnol 38, 44-49 (2020); Oh et al., J. Exp. Med. 219 (5): e20211530 (2022)). As discussed in the Examples provided, using non-viral DNA templates in methods of the disclosure to edit primary cells can result in knock-in efficiencies that are similar to knock-in efficiencies seen using AAV6.

[0307] In certain embodiments, the method comprises contacting the cell with a nuclease that causes a break within an endogenous coding sequence of an essential gene in the cell wherein the essential gene encodes at least one gene product that is required for survival and/or proliferation of the cell. The cell is also contacted with (i) a donor template that comprises a knock-in cassette comprising an exogenous coding sequence for a gene product of interest in frame with and downstream (3′) of an exogenous coding sequence or partial coding sequence of the essential gene and/or (ii) a donor template that comprises a knock-in cassette comprising an exogenous coding sequence for a gene product of interest in frame with and upstream (5′) of an exogenous coding sequence or partial coding sequence of the essential gene (FIG. 3D). The knock-in cassette is integrated into the genome of the cell by homology-directed repair (HDR) of the break, resulting in a genome-edited cell that expresses the gene product of interest and the gene product encoded by the essential gene that is required for survival and/or proliferation of the cell, or a functional variant thereof. The genetically modified “knock-in” cell survives and proliferates to produce progeny cells with genomes that also include the exogenous coding sequence for the gene product of interest. This is illustrated in FIG. 3A for an exemplary method.

[0308] If the knock-in cassette is not properly integrated into the genome of the cell, undesired editing events that result from the break, e.g., NHEJ-mediated creation of indels, may produce a non-functional, e.g., out of frame, version of the essential gene. This produces a “knock-out” cell when the editing efficiency of the nuclease is high enough to disrupt both alleles. In certain embodiments, this produces a “knock-out” cell when the editing efficiency of the nuclease is high enough to disrupt one allele. Without sufficient functional copies of the essential gene these “knock-out” cells are unable to survive and do not produce any progeny cells.

[0309] In some embodiments, the present disclosure provides methods of editing the genome of a cell. In certain embodiments, the method comprises contacting the cell with a nuclease that causes a break within an endogenous non-coding sequence of an essential gene in the cell wherein the essential gene encodes at least one gene product that is required for survival and/or proliferation of the cell. In some embodiments, such a break within an endogenous non-coding sequence alters a functional region of an essential gene that influences post-transcriptional modification patterns, e.g., mRNA splicing, RNA stability, RNA editing, RNA interference, etc. In some embodiments, such a break within an endogenous non-coding sequence occurs in a functional region of the essential gene, for example, but not limited to: a splicesome target site (e.g., a 5′ splice donor site, an intron branch point sequence, a 3′ splice acceptor site, and/or a polypyrimidine tract), an intronic splicing silencer, an intronic splicing enhancer, an exonic splicing silencer, an exonic splicing enhancer, an endogenous RNA interference binding site (e.g., micro RNA, small interfering RNA, etc.), an endogenous RNA editing machinery binding site (e.g., a binding site for adenosine deaminases, cytidine deaminases, etc.), or combinations thereof. In some embodiments, the nuclease causes a break at or near where an intron borders an exon in an essential gene, reducing or disrupting the function of the essential gene.

[0310] Since the “knock-in” cells survive and the “knock-out” cells do not survive, the method automatically selects for the “knock-in” cells when it is applied to a population of starting cells. Significantly, in certain embodiments, the method does not require high knock-in efficiencies because of this automatic selection aspect. It is therefore particularly suitable for methods where the donor template is a dsDNA (e.g., a plasmid) where knock-in efficiencies are often below 5%. As noted in the exemplary method of FIG. 3C, in some embodiments some of the cells in the population of starting cells may remain unedited, i.e., unaffected by the nuclease. These cells would also survive and produce progeny with genomes that do not include the exogenous coding sequence for the gene product of interest. When the nuclease editing efficiency is high, e.g., about 60-90%, or higher the percentage of unedited cells will be relatively low as compared to the percentage of genetically modified cells. In some embodiments, high nuclease editing efficiencies (e.g., greater than 65%, greater than 70%, greater than 75%, greater than 80%, greater than 85%, greater than 90%, or greater than 95%) facilitates efficient population wide transgene integration, as the percentage of unedited cells will be relatively low as compared to the percentage of genetically modified cells. In some embodiments of the methods disclosed herein, at least about 65% of the cells (e.g., about 70%, about 75%, about 80%, about 85%, about 90%, about 91%, about 92%, about 93%, about 94%, about 95%, about 96%, about 97%, about 98%, or about 99% of the cells) are edited by a nuclease, e.g., a Cas12a, Cas9, Cas12b, Cas12c, Cas12e, CasX, or CasΦ (Cas12j), or a variant thereof (e.g., a variant with a high editing efficiency). In some embodiments, an RNP containing a CRISPR nuclease (e.g., Cas12a, Cas9, Cas12b, Cas12c, Cas12e, CasX, or CasΦ (Cas12j), or a variant thereof (e.g., a variant with a high editing efficiency)) and a guide are capable of cleaving the locus of an essential gene (e.g., a terminal exon in the locus of any essential gene provided in Table 3) in at least 65% of the cells in a population of cells (e.g., at least 65%, at least 70%, at least 75%, at least 80%, at least 85%, at least 90%, at least 91%, at least 92%, at least 93%, at least 94%, at least 95%, at least 96%, at least 97%, at least 98%, or at least 99% of the cells in a population of cells). In some embodiments, an RNP containing a CRISPR nuclease (e.g., Cas12a, Cas9, Cas12b, Cas12c, Cas12e, CasX, or CasΦ (Cas12j), or a variant thereof (e.g., a variant with a high editing efficiency)) and a guide are capable of inducing knock-in cassette integration at a locus of an essential gene (e.g., a terminal exon in the locus of any essential gene provided in Table 3) in at least 65% of the cells in a population of cells (e.g., at least 65%, at least 70%, at least 75%, at least 80%, at least 85%, at least 90%, at least 91%, at least 92%, at least 93%, at least 94%, at least 95%, at least 96%, at least 97%, at least 98%, or at least 99% of the cells in a population of cells), e.g., at between 4 days and 10 days (e.g., 4 days, 5 days, 6 days, 7 days, 8 days, 9 days or 10 days) after the cells in the population of cells is contacted with the RNP containing a CRISPR nuclease. In some embodiments, editing efficiency is determined prior to target cell die off, e.g., at day 1 and/or day 2 post transfection or transduction. In some embodiments, editing efficiency measured at day 1 and/or day 2 post transfection or transduction may not capture the complete proportion of cells for which editing occurred, as in some embodiments, certain editing events may result in near immediate and/or swift cell death. In some embodiments, near immediate and/or swift cell death may be any period of time less than 48 hours post transfection or transduction, for example, less than 48 hours, less than 44 hours, less than 40 hours, less than 36 hours, less than 32 hours, less than 28 hours, less than 24 hours, less than 20 hours, less than 16 hours, less than 15 hours, less than 14 hours, less than 13 hours, less than 12 hours, less than 11 hours, less than 10 hours, less than 9 hours, less than 8 hours, less than 7 hours, less than 6 hours, less than 5 hours, less than 4 hours, less than 3 hours, less than 2 hours, or less than 1 hour after transfection or transduction.

[0311] In some embodiments, the nuclease causes a double-strand break. In some embodiments the nuclease causes a single-strand break, e.g., in some embodiments the nuclease is a nickase. In some embodiments the nuclease is a prime editor which comprises a nickase domain fused to a reverse transcriptase domain. In some embodiments the nuclease is an RNA-guided prime editor and the gRNA comprises the donor template. In some embodiments a dual-nickase system is used which causes a double-strand break via two single-strand breaks on opposing strands of a double-stranded DNA, e.g., genomic DNA of the cell.

[0312] In some embodiments, the present disclosure provides methods suitable for high-efficiency knock-in (e.g., a high proportion of a cell population comprises a knock-in allele), overcoming a major manufacturing challenge. In some embodiments, high-efficiency knock-in results in at least 65% of the cells in a population of cells comprising a knock-in allele (e.g., at least 65%, at least 70%, at least 75%, at least 80%, at least 85%, at least 90%, at least 91%, at least 92%, at least 93%, at least 94%, at least 95%, at least 96%, at least 97%, at least 98%, or at least 99% of the cells in a population of cells comprise a knock-in allele). Historically, gene of interest knock-in using plasmid vectors results in efficiencies typically between 0.1 and 5% (see e.g., Zhu et al., CRISPR/Cas-Mediated Selection-free Knockin Strategy in Human Embryonic Stem Cells. Stem Cell Reports. 2015; 4 (6): 1103-1111), this low knock-in efficiency can result in a need for extensive time and resources devoted to screening potentially edited clones.

[0313] In some embodiments, a gene of interest knocked into a cell may have a role in effector function, specificity, stealth, persistence, homing/chemotaxis, and/or resistance to certain chemicals (see for example, Saetersmoen et al., Seminars in Immunopathology, 2019).

[0314] In certain embodiments, the present disclosure provides methods for creation of knock-in cells that maintain high levels of expression regardless of age, differentiation status, and/or exogenous conditions. For example, in some embodiments, an integrated cargo is expressed at an optimal level with a desired subcellular localization as a function of an insertion site. In some embodiments, the present disclosure provides such cells.

### Systems for Editing the Genome of a Cell

[0315] In one aspect the present disclosure provides systems for editing the genome of a cell, e.g., a primary cell. In some embodiments, the system comprises the cell, a nuclease that causes a break within an endogenous coding sequence of an essential gene of the cell, wherein the essential gene encodes a gene product that is required for survival and/or proliferation of the cell, and a donor template that comprises a knock-in cassette comprising an exogenous coding sequence for a gene product of interest in frame with and downstream (3′) of an exogenous coding sequence or partial coding sequence of the essential gene.

[0316] In some embodiments, the nuclease causes a double-strand break. In some embodiments the nuclease causes a single-strand break, e.g., in some embodiments the nuclease is a nickase. In some embodiments the nuclease is a prime editor which comprises a nickase domain fused to a reverse transcriptase domain. In some embodiments the nuclease is an RNA-guided prime editor and the gRNA comprises the donor template. In some embodiments a dual-nickase system is used which causes a double-strand break via two single-strand breaks on opposing strand of a double-stranded DNA, e.g., genomic DNA of the cell.

[0317] In one aspect, genome editing systems of the present disclosure may be used, for example, to edit primary cells or stem cells. In some embodiments, genome editing systems of the present disclosure include at least two components adapted from naturally occurring CRISPR systems: a guide RNA (gRNA) and an RNA-guided nuclease. These two components form a complex that is capable of associating with a specific nucleic acid sequence and editing the DNA in or around that nucleic acid sequence, for instance by making one or more of a single-strand break (an SSB or nick), a double-strand break (a DSB) and/or a point mutation.

[0318] Naturally occurring CRISPR systems are organized evolutionarily into two classes and five types (Makarova et al. Nat Rev Microbiol. 2011 June; 9 (6): 467-477 (“Makarova”)), and while genome editing systems of the present disclosure may adapt components of any type or class of naturally occurring CRISPR system, the embodiments presented herein are generally adapted from Class 2, and type II or V CRISPR systems. Class 2 systems, which encompass types II and V, are characterized by relatively large, multidomain RNA-guided nuclease proteins (e.g., Cas9 or Cpf1) and one or more guide RNAs (e.g., a crRNA and, optionally, a tracrRNA) that form ribonucleoprotein (RNP) complexes that associate with (i.e., target) and cleave specific loci complementary to a targeting (or spacer) sequence of the crRNA. Genome editing systems according to the present disclosure similarly target and edit cellular DNA sequences, but differ significantly from CRISPR systems occurring in nature. For example, the unimolecular guide RNAs described herein do not occur in nature, and both guide RNAs and RNA-guided nucleases according to this disclosure may incorporate any number of non-naturally occurring modifications.

[0319] Genome editing systems can be implemented (e.g., administered or delivered to a cell or a subject) in a variety of ways, and different implementations may be suitable for distinct applications. For instance, a genome editing system is implemented, in certain embodiments, as a protein/RNA complex (a ribonucleoprotein, or RNP), which can be included in a pharmaceutical composition that optionally includes a pharmaceutically acceptable carrier and/or an encapsulating agent, such as a lipid or polymer micro- or nano-particle, micelle, liposome, etc. In certain embodiments, a genome editing system is implemented as one or more nucleic acids encoding the RNA-guided nuclease and guide RNA components described above (optionally with one or more additional components); in certain embodiments, the genome editing system is implemented as one or more vectors comprising such nucleic acids, for instance a viral vector such as an adeno-associated virus; and in certain embodiments, the genome editing system is implemented as a combination of any of the foregoing. Additional or modified implementations that operate according to the principles set forth herein will be apparent to the skilled artisan and are within the scope of this disclosure.

[0320] It should be noted that the genome editing systems of the present disclosure can be targeted to a single specific nucleotide sequence, or may be targeted to—and capable of editing in parallel—two or more specific nucleotide sequences through the use of two or more guide RNAs. The use of multiple gRNAs is referred to as “multiplexing” throughout this disclosure, and can be employed to target multiple, unrelated target sequences of interest, or to form multiple SSBs or DSBs within a single target domain and, in some cases, to generate specific edits within such target domain. For example, International Patent Publication No. WO 2015/138510 by Maeder et al. (“Maeder”) describes a genome editing system for correcting a point mutation (C.2991+1655A to G) in the human CEP290 gene that results in the creation of a cryptic splice site, which in turn reduces or eliminates the function of the gene. The genome editing system of Maeder utilizes two guide RNAs targeted to sequences on either side of (i.e., flanking) the point mutation, and forms DSBs that flank the mutation. This, in turn, promotes deletion of the intervening sequence, including the mutation, thereby eliminating the cryptic splice site and restoring normal gene function.

[0321] As another example, WO 2016/073990 by Cotta-Ramusino, et al. (“Cotta-Ramusino”) describes a genome editing system that utilizes two gRNAs in combination with a Cas9 nickase (a Cas9 that makes a single strand nick such as S. pyogenes D10A), an arrangement termed a “dual-nickase system.” The dual-nickase system of Cotta-Ramusino is configured to make two nicks on opposite strands of a sequence of interest that are offset by one or more nucleotides, which nicks combine to create a double strand break having an overhang (5′ in the case of Cotta-Ramusino, though 3′ overhangs are also possible). The overhang, in turn, can facilitate homology directed repair events in some circumstances. And, as another example, WO 2015/070083 by Palestrant et al. (“Palestrant”) describes a gRNA targeted to a nucleotide sequence encoding Cas9 (referred to as a “governing RNA”), which can be included in a genome editing system comprising one or more additional gRNAs to permit transient expression of a Cas9 that might otherwise be constitutively expressed, for example in some virally transduced cells. These multiplexing applications are intended to be exemplary, rather than limiting, and the skilled artisan will appreciate that other applications of multiplexing are generally compatible with the genome editing systems described here.

[0322] Genome editing systems can, in some instances, form double strand breaks that are repaired by cellular DNA double-strand break mechanisms such as NHEJ or HDR. These mechanisms are described throughout the literature, for example by Davis & Maizels, PNAS, 111 (10): E924-932, Mar. 11, 2014 (“Davis”) (describing Alt-HDR); Frit et al. DNA Repair 17 (2014) 81-97 (“Frit”) (describing Alt-NHEJ); and Iyama and Wilson III, DNA Repair (Amst.) 2013-August; 12 (8): 620-636 (“Iyama”) (describing canonical HDR and NHEJ pathways generally).

[0323] Where genome editing systems operate by forming DSBs, such systems optionally include one or more components that promote or facilitate a particular mode of double-strand break repair or a particular repair outcome. For instance, Cotta-Ramusino also describes genome editing systems in which a single stranded oligonucleotide “donor template” is added; the donor template is incorporated into a target region of cellular DNA that is cleaved by the genome editing system, and can result in a change in the target sequence.

[0324] In certain embodiments, genome editing systems modify a target sequence, or modify expression of a target gene in or near the target sequence, without causing single- or double-strand breaks. For example, a genome editing system may include an RNA-guided nuclease fused to a functional domain that acts on DNA, thereby modifying the target sequence or its expression. As one example, an RNA-guided nuclease can be connected to (e.g., fused to) a cytidine deaminase functional domain, and may operate by generating targeted C-to-A substitutions. Exemplary nuclease/deaminase fusions are described in Komor et al. Nature 533, 420-424 (19 May 2016) (“Komor”). Alternatively, a genome editing system may utilize a cleavage-inactivated (i.e., a “dead”) nuclease, such as a dead Cas9 (dCas9), and may operate by forming stable complexes on one or more targeted regions of cellular DNA, thereby interfering with functions involving the targeted region(s) including, without limitation, mRNA transcription, chromatin remodeling, etc.

### Nuclease

[0325] Any nuclease that causes a break within an endogenous genomic sequence, e.g., a coding sequence of an essential gene of the cell can be used in the methods of the present disclosure. In some embodiments the nuclease is a DNA nuclease. In some embodiments the nuclease causes a single-strand break (SSB) within an endogenous coding sequence of an essential gene of the cell, e.g., in a “prime editing” system. In some embodiments the nuclease causes a double-strand break (DSB) within an endogenous coding sequence of an essential gene of the cell. In some embodiments the double-strand break is caused by a single nuclease. In some embodiments the double-strand break is caused by two nucleases that each cause a single-strand break on opposing strands, e.g., a dual “nickase” system. In some embodiments the nuclease is a CRISPR/Cas nuclease and the method further comprises contacting the cell with one or more guide molecules for the CRISPR/Cas nuclease. Exemplary CRISPR/Cas nucleases and guide molecules are described in more detail herein. It is to be understood that the nuclease (including a nickase) is not limited in any manner and can also be a zinc finger nuclease (ZFN), a transcription activator-like effector nuclease (TALEN), a meganuclease, or other nuclease known in the art (or a combination thereof). Methods for designing zinc finger nucleases (ZFNs) are well known in the art, e.g., see Urnov et al., Nature Reviews Genetics 2010; 11:636-640 and Paschon et al., Nat. Commun. 2019; 10 (1): 1133 and references cited therein. Methods for designing transcription activator-like effector nucleases (TALENs) are well known in the art, e.g., see Joung and Sander, Nat. Rev. Mol. Cell Biol. 2013; 14 (1): 49-55 and references cited therein. Methods for designing meganucleases are also well known in the art, e.g., see Silva et al., Curr. Gene Ther. 2011; 11 (1): 11-27 and Redel and Prather, Toxicol. Pathol. 2016; 44 (3): 428-433.

[0326] In some embodiments, a nuclease suitable for methods described herein can have an editing efficiency that is greater than about 50%. In some embodiments, a nuclease suitable for methods described herein can have an editing efficiency that is greater than about 55%. In some embodiments, a nuclease suitable for methods described herein can have an editing efficiency that is greater than about 60%. In some embodiments, a nuclease suitable for methods described herein can have an editing efficiency that is greater than about 65%. In some embodiments, a nuclease suitable for methods described herein can have an editing efficiency that is greater than about 70%. In some embodiments, a nuclease suitable for methods described herein can have an editing efficiency that is greater than about 75%. In some embodiments, a nuclease suitable for methods described herein can have an editing efficiency that is greater than about 80%. In some embodiments, a nuclease suitable for methods described herein can have an editing efficiency that is greater than about 85%. In some embodiments, a nuclease suitable for methods described herein can have an editing efficiency that is greater than about 90%. In some embodiments, a nuclease suitable for methods described herein can have an editing efficiency that is greater than about 95%. In some embodiments, a nuclease suitable for methods described herein can have an editing efficiency that is greater than about 96%. In some embodiments, a nuclease suitable for methods described herein can have an editing efficiency that is greater than about 97%. In some embodiments, a nuclease suitable for methods described herein can have an editing efficiency that is greater than about 98%. In some embodiments, a nuclease suitable for methods described herein can have an editing efficiency that is greater than about 99%.

[0327] In general, the nuclease can be delivered to the cell as a protein or a nucleic acid encoding the protein, e.g., a DNA molecule or mRNA molecule. The protein or nucleic acid can be combined with other delivery agents, e.g., lipids or polymers in a lipid or polymer nanoparticle and targeting agents such as antibodies or other binding agents with specificity for the cell. The DNA molecule can be a nucleic acid vector, such as a viral genome or circular double-stranded DNA, e.g., a plasmid. Nucleic acid vectors encoding a nuclease can include other coding or non-coding elements. For example, a nuclease can be delivered as part of a viral genome (e.g., in an AAV, adenoviral or lentiviral genome) that includes certain genomic backbone elements (e.g., inverted terminal repeats, in the case of an AAV genome).

[0328] A CRISPR/Cas nuclease can be delivered to the cell as a protein or a nucleic acid encoding the protein, e.g., a DNA molecule or mRNA molecule. The guide molecule can be delivered as an RNA molecule or encoded by a DNA molecule. A CRISPR/Cas nuclease can also be delivered with a guide molecule as a ribonucleoprotein (RNP) and introduced into the cell via nucleofection (electroporation).

### Crispr/Cas Nucleases

[0329] CRISPR/Cas nucleases according to the present disclosure include, but are not limited to, naturally-occurring Class 2 CRISPR nucleases such as Cas9, and Cpf1 (Cas12a), as well as other Cas12 nucleases and nucleases derived or obtained therefrom. In functional terms, CRISPR/Cas nucleases are defined as those nucleases that: (a) interact with (e.g., complex with) a gRNA; and (b) together with the gRNA, associate with, and optionally cleave or modify, a target region of a DNA that includes (i) a sequence complementary to the targeting domain of the gRNA and, optionally, (ii) an additional sequence referred to as a “protospacer adjacent motif,” or “PAM.” which is described in greater detail below. As the following examples will illustrate, CRISPR/Cas nucleases can be defined, in broad terms, by their PAM specificity and cleavage activity, even though variations may exist between individual CRISPR/Cas nucleases that share the same PAM specificity or cleavage activity. Skilled artisans will appreciate that some aspects of the present disclosure relate to systems and methods that can be implemented using any suitable CRISPR/Cas nuclease having a certain PAM specificity and/or cleavage activity. For this reason, unless otherwise specified, the term CRISPR/Cas nuclease should be understood as a generic term, and not limited to any particular type (e.g., Cas9 vs. Cpf1), species (e.g., S. pyogenes vs. S. aureus) or variation (e.g., full-length vs. truncated or split; naturally-occurring PAM specificity vs. engineered PAM specificity, etc.) of CRISPR/Cas nuclease.

[0330] The PAM sequence takes its name from its sequential relationship to the “protospacer” sequence that is complementary to gRNA targeting domains (or “spacers”). Together with protospacer sequences, PAM sequences define target regions or sequences for specific CRISPR/Cas nuclease and gRNA combinations.

[0331] Various CRISPR/Cas nucleases may require different sequential relationships between PAMs and protospacers. In general, Cas9s recognize PAM sequences that are 3′ of the protospacer. Cpf1 (Cas12a), on the other hand, generally recognizes PAM sequences that are 5′ of the protospacer.

[0332] In addition to recognizing specific sequential orientations of PAMs and protospacers, CRISPR/Cas nucleases can also recognize specific PAM sequences. S. aureus Cas9, for instance, recognizes a PAM sequence of NNGRRT or NNGRRV, wherein the N residues are immediately 3′ of the region recognized by the gRNA targeting domain. S. pyogenes Cas9 recognizes NGG PAM sequences. F. novicida Cpf1 recognizes a TTN PAM sequence. PAM sequences have been identified for a variety of CRISPR/Cas nucleases, and a strategy for identifying novel PAM sequences has been described by Shmakov et al., Molecular Cell 2015; 60:385-397. It should also be noted that engineered CRISPR/Cas nucleases can have PAM specificities that differ from the PAM specificities of reference molecules (for instance, in the case of an engineered CRISPR/Cas nuclease, the reference molecule may be the naturally occurring variant from which the CRISPR/Cas nuclease is derived, or the naturally occurring variant having the greatest amino acid sequence homology to the engineered CRISPR/Cas nuclease).

[0333] In addition to their PAM specificity, CRISPR/Cas nucleases can be characterized by their DNA cleavage activity: naturally-occurring CRISPR/Cas nucleases typically form double-strand breaks (DSBs) in target nucleic acids, but engineered variants called “nickases” have been produced that generate only single-strand breaks (SSBs), e.g., those discussed in Ran et al., Cell 2013; 154 (6): 1380-1389 (“Ran”), or that that do not cut at all.

### Cas9

[0334] Crystal structures have been determined for S. pyogenes Cas9 (Jinek et al., Science 2014; 343 (6176): 1247997 (“Jinek 2014”), and for S. aureus Cas9 in complex with a unimolecular guide RNA and a target DNA. See Nishimasu et al., Cell 1024; 156:935-949 (“Nishimasu 2014”); Nishimasu et al., Cell 2015; 162:1113-1126 (“Nishimasu 2015”); and Anders et al., Nature 2014; 513 (7519): 569-73 (“Anders 2014”).

[0335] A naturally occurring Cas9 protein comprises two lobes: a recognition (REC) lobe and a nuclease (NUC) lobe; each of which comprise particular structural and/or functional domains. The REC lobe comprises an arginine-rich bridge helix (BH) domain, and at least one REC domain (e.g., a REC1 domain and, optionally, a REC2 domain). The REC lobe does not share structural similarity with other known proteins, indicating that it is a unique functional domain. While not wishing to be bound by any theory, mutational analyses suggest specific functional roles for the BH and REC domains: the BH domain appears to play a role in gRNA: DNA recognition, while the REC domain is thought to interact with the repeat: anti-repeat duplex of the gRNA and to mediate the formation of the Cas9/gRNA complex.

[0336] The NUC lobe comprises a RuvC domain, an HNH domain, and a PAM-interacting (PI) domain. The RuvC domain shares structural similarity to retroviral integrase superfamily members and cleaves the non-complementary (i.e., bottom) strand of the target nucleic acid. It may be formed from two or more split RuvC motifs (such as RuvC I, RuvCII, and RuvCIII in S. pyogenes and S. aureus). The HNH domain, meanwhile, is structurally similar to HNN endonuclease motifs, and cleaves the complementary (i.e., top) strand of the target nucleic acid. The PI domain, as its name suggests, contributes to PAM specificity.

[0337] While certain functions of Cas9 are linked to (but not necessarily fully determined by) the specific domains set forth above, these and other functions may be mediated or influenced by other Cas9 domains, or by multiple domains on either lobe. For instance, in S. pyogenes Cas9, as described in Nishimasu 2014, the repeat: antirepeat duplex of the gRNA falls into a groove between the REC and NUC lobes, and nucleotides in the duplex interact with amino acids in the BH, PI, and REC domains. Some nucleotides in the first stem loop structure also interact with amino acids in multiple domains (PI, BH and REC1), as do some nucleotides in the second and third stem loops (RuvC and PI domains).

### Cpf1

[0338] The crystal structure of Acidaminococcus sp. Cpf1 in complex with crRNA and a dsDNA target including a TTTN PAM sequence has been solved by Yamano et al., Cell. 2016; 165 (4): 949-962 (“Yamano”). Cpf1, like Cas9, has two lobes: a REC (recognition) lobe, and a NUC (nuclease) lobe. The REC lobe includes REC1 and REC2 domains, which lack similarity to any known protein structures. The NUC lobe, meanwhile, includes three RuvC domains (RuvC-I -II and -III) and a BH domain. However, in contrast to Cas9, the Cpf1 REC lobe lacks an HNH domain, and includes other domains that also lack similarity to known protein structures: a structurally unique PI domain, three Wedge (WED) domains (WED-I, -II and -III), and a nuclease (Nuc) domain.

[0339] While Cas9 and Cpf1 share similarities in structure and function, it should be appreciated that certain Cpf1 activities are mediated by structural domains that are not analogous to any Cas9 domains. For instance, cleavage of the complementary strand of the target DNA appears to be mediated by the Nuc domain, which differs sequentially and spatially from the HNH domain of Cas9. Additionally, the non-targeting portion of Cpf1 gRNA (the handle) adopts a pseudoknot structure, rather than a stem loop structure formed by the repeat:antirepeat duplex in Cas9 gRNAs.

### Nuclease Variants

[0340] The CRISPR/Cas nucleases described herein have activities and properties that can be useful in a variety of applications, but the skilled artisan will appreciate that CRISPR/Cas nucleases can also be modified in certain instances, to alter cleavage activity, PAM specificity, or other structural or functional features.

[0341] Turning first to modifications that alter cleavage activity, mutations that reduce or eliminate the activity of domains within the NUC lobe have been described above. Exemplary mutations that may be made in the RuvC domains, in the Cas9 HNH domain, or in the Cpf1 Nuc domain are described in Ran, Yamano and PCT Publication No. WO 2016/073990A1, the entire contents of each of which are incorporated herein by reference. In general, mutations that reduce or eliminate activity in one of the two nuclease domains result in CRISPR/Cas nucleases with nickase activity, but it should be noted that the type of nickase activity varies depending on which domain is inactivated. As one example, inactivation of a RuvC domain or of a Cas9 HNH domain results in a nickase. Exemplary nickase variants include Cas9 D10A and Cas9 H840A (numbering scheme according to SpCas9 wild-type sequence). Additional suitable nickase variants, including Cas12a variants, will be apparent to the skilled artisan based on the present disclosure and the knowledge in the art. The present disclosure is not limited in this respect. In some embodiments a nickase may be fused to a reverse transcriptase to produce a prime editor (PE), e.g., as described in Anzalone et al., Nature 2019; 576:149-157, the entire contents of which are incorporated herein by reference.

[0342] Modifications of PAM specificity relative to naturally occurring Cas9 reference molecules has been described for both S. pyogenes (Kleinstiver et al., Nature 2015; 523 (7561): 481-5); and S. aureus (Kleinstiver et al., Nat Biotechnol. 2015; 33 (12): 1293-1298). Modifications that improve the targeting fidelity of Cas9 have also been described (Kleinstiver et al., Nature 2016; 529:490-495). Each of these references is incorporated by reference herein.

[0343] CRISPR/Cas nucleases have also been split into two or more parts, as described by Zetsche et al., Nat Biotechnol. 2015; 33 (2): 139-42, incorporated by reference, and by Fine et al., Sci Rep. 2015; 5:10777, incorporated by reference.

[0344] CRISPR/Cas nucleases can be, in certain embodiments, size-optimized or truncated, for instance via one or more deletions that reduce the size of the nuclease while still retaining gRNA association, target and PAM recognition, and cleavage activities. In certain embodiments, RNA guided nucleases are bound, covalently or non-covalently, to another polypeptide, nucleotide, or other structure, optionally by means of a linker. Exemplary bound nucleases and linkers are described by Guilinger et al., Nature Biotech. 2014; 32:577-582, which is incorporated by reference herein.

[0345] CRISPR/Cas nucleases also optionally include a tag, such as, but not limited to, a nuclear localization signal, to facilitate movement of CRISPR/Cas nuclease protein into the nucleus. In certain embodiments, the CRISPR/Cas nuclease can incorporate C- and/or N-terminal nuclear localization signals. Nuclear localization sequences are known in the art.

[0346] The foregoing list of modifications is intended to be exemplary in nature, and the skilled artisan will appreciate, in view of the instant disclosure, that other modifications may be possible or desirable in certain applications. For brevity, therefore, exemplary systems, methods and compositions of the present disclosure are presented with reference to particular CRISPR/Cas nucleases, but it should be understood that the CRISPR/Cas nucleases used may be modified in ways that do not alter their operating principles. Such modifications are within the scope of the present disclosure.

[0347] Exemplary suitable nuclease variants include, but are not limited to, AsCpf1 (AsCas12a) variants comprising an M537R substitution, an H800A substitution, and/or an F870L substitution, or any combination thereof (numbering scheme according to AsCpf1 wild-type sequence). In some embodiments, a nuclease variant is a Cas12a variant, e.g., a Cas12a variant comprising 1, 2, or 3 of the amino acid substitutions selected from M537R. F870L, and H800A. In some embodiments, a Cas12a variant comprises an amino acid sequence having at least about 90%, 95%, or 100% identity to an AsCpf1 sequence described herein.

[0348] Other suitable modifications of the AsCpf1 amino acid sequence are known to those of ordinary skill in the art. Some exemplary sequences of wild-type AsCpf1 and AsCpf1 variants are provided below:

-His-AsCpf1-sNLS-sNLS H800A amino acid sequence
SEQ ID NO: 58
MGHHHHHHGSTQFEGFTNLYQVSKTLRFELIPQGKTLKHIQEQGFIEEDKARNDHYKELKPIID
RIYKTYADQCLQLVQLDWENLSAAIDSYRKEKTEETRNALIEEQATYRNAIHDYFIGRTDNLTD
AINKRHAEIYKGLFKAELFNGKVLKQLGTVTTTEHENALLRSFDKFTTYFSGFYENRKNVFSAE
DISTAIPHRIVQDNFPKFKENCHIFTRLITAVPSLREHFENVKKAIGIFVSTSIEEVFSFPFYN
QLLTQTQIDLYNQLLGGISREAGTEKIKGLNEVLNLAIQKNDETAHIIASLPHRFIPLFKQILS
DRNTLSFILEEFKSDEEVIQSFCKYKTLLRNENVLETAEALFNELNSIDLTHIFISHKKLETIS
SALCDHWDTLRNALYERRISELTGKITKSAKEKVQRSLKHEDINLQEIISAAGKELSEAFKQKT
SEILSHAHAALDQPLPTTLKKQEEKEILKSQLDSLLGLYHLLDWFAVDESNEVDPEFSARLTGI
KLEMEPSLSFYNKARNYATKKPYSVEKFKLNFQMPTLASGWDVNKEKNNGAILFVKNGLYYLGI
MPKQKGRYKALSFEPTEKTSEGFDKMYYDYFPDAAKMIPKCSTQLKAVTAHFQTHTTPILLSNN
FIEPLEITKEIYDLNNPEKEPKKFQTAYAKKTGDQKGYREALCKWIDFTRDFLSKYTKTTSIDL
SSLRPSSQYKDLGEYYAELNPLLYHISFQRIAEKEIMDAVETGKLYLFQIYNKDFAKGHHGKPN
LHTLYWTGLFSPENLAKTSIKLNGQAELFYRPKSRMKRMAARLGEKMLNKKLKDQKTPIPDTLY
QELYDYVNHRLSHDLSDEARALLPNVITKEVSHEIIKDRRFTSDKFFFHVPITLNYQAANSPSK
FNQRVNAYLKEHPETPIIGIDRGERNLIYITVIDSTGKILEQRSLNTIQQFDYQKKLDNREKER
VAARQAWSVVGTIKDLKQGYLSQVIHEIVDLMIHYQAVVVLENLNFGFKSKRTGIAEKAVYQQF
EKMLIDKLNCLVLKDYPAEKVGGVLNPYQLTDQFTSFAKMGTQSGFLFYVPAPYTSKIDPLTGF
VDPFVWKTIKNHESRKHFLEGFDFLHYDVKTGDFILHFKMNRNLSFQRGLPGFMPAWDIVFEKN
ETQFDAKGTPFIAGKRIVPVIENHRFTGRYRDLYPANELIALLEEKGIVFRDGSNILPKLLEND
DSHAIDTMVALIRSVLQMRNSNAATGEDYINSPVRDLNGVCFDSRFQNPEWPMDADANGAYHIA
LKGQLLLNHLKESKDLKLQNGISNQDWLAYIQELRNGSPKKKRKVGSPKKKRKV
-Cpf1 variant 1 amino acid sequence
SEQ ID NO: 59
MTQFEGFTNLYQVSKTLRFELIPQGKTLKHIQEQGFIEEDKARNDHYKELKPIIDRIYKTYADQ
CLQLVQLDWENLSAAIDSYRKEKTEETRNALIEEQATYRNAIHDYFIGRTDNLTDAINKRHAEI
YKGLFKAELFNGKVLKQLGTVTTTEHENALLRSFDKFTTYFSGFYENRKNVFSAEDISTAIPHR
IVQDNFPKFKENCHIFTRLITAVPSLREHFENVKKAIGIFVSTSIEEVFSFPFYNQLLTQTQID
LYNQLLGGISREAGTEKIKGLNEVLNLAIQKNDETAHIIASLPHRFIPLFKQILSDRNTLSFIL
EEFKSDEEVIQSFCKYKILLRNENVLETAEALFNELNSIDLTHIFISHKKLETISSALCDHWDT
LRNALYERRISELTGKITKSAKEKVQRSLKHEDINLQEIISAAGKELSEAFKQKTSEILSHAHA
ALDQPLPTTLKKQEEKEILKSQLDSLLGLYHLLDWFAVDESNEVDPEFSARLTGIKLEMEPSLS
FYNKARNYATKKPYSVEKFKLNFQRPTLASGWDVNKEKNNGAILFVKNGLYYLGIMPKQKGRYK
ALSFEPTEKTSEGFDKMYYDYFPDAAKMIPKCSTQLKAVTAHFQTHTTPILLSNNFIEPLEITK
EIYDLNNPEKEPKKFQTAYAKKTGDQKGYREALCKWIDFTRDFLSKYTKTTSIDLSSLRPSSQY
KDLGEYYAELNPLLYHISFQRIAEKEIMDAVETGKLYLFQIYNKDFAKGHHGKPNLHTLYWTGL
FSPENLAKTSIKLNGQAELFYRPKSRMKRMAHRLGEKMLNKKLKDQKTPIPDTLYQELYDYVNH
RLSHDLSDEARALLPNVITKEVSHEIIKDRRFTSDKFLFHVPITLNYQAANSPSKFNQRVNAYL
KEHPETPIIGIDRGERNLIYITVIDSTGKILEQRSLNTIQQFDYQKKLDNREKERVAARQAWSV
VGTIKDLKQGYLSQVIHEIVDLMIHYQAVVVLENLNFGFKSKRIGIAEKAVYQQFEKMLIDKLN
CLVLKDYPAEKVGGVLNPYQLTDQFTSFAKMGTQSGFLFYVPAPYTSKIDPLTGFVDPFVWKTI
KNHESRKHFLEGFDFLHYDVKTGDFILHFKMNRNLSFQRGLPGFMPAWDIVFEKNETQFDAKGT
PFIAGKRIVPVIENHRFTGRYRDLYPANELIALLEEKGIVFRDGSNILPKLLENDDSHAIDTMV
ALIRSVLQMRNSNAATGEDYINSPVRDLNGVCFDSRFQNPEWPMDADANGAYHIALKGQLLLNH
LKESKDLKLQNGISNQDWLAYIQELRNGRSSDDEATADSQHAAPPKKKRKVGGSGGSGGSGGSG
GSGGSGGSGGSLEHHHHHH
-Cpf1 variant 2 amino acid sequence
SEQ ID NO: 60
MTQFEGFTNLYQVSKTLRFELIPQGKTLKHIQEQGFIEEDKARNDHYKELKPIIDRIYKTYADQ
CLQLVQLDWENLSAAIDSYRKEKTEETRNALIEEQATYRNAIHDYFIGRIDNLTDAINKRHAEI
YKGLFKAELFNGKVLKQLGTVTTTEHENALLRSFDKFTTYFSGFYENRKNVFSAEDISTAIPHR
IVQDNFPKFKENCHIFTRLITAVPSLREHFENVKKAIGIFVSTSIEEVFSFPFYNQLLTQTQID
LYNQLLGGISREAGTEKIKGLNEVLNLAIQKNDETAHIIASLPHRFIPLFKQILSDRNILSFIL
EEFKSDEEVIQSFCKYKTLLRNENVLETAEALFNELNSIDLTHIFISHKKLETISSALCDHWDT
LRNALYERRISELTGKITKSAKEKVQRSLKHEDINLQEIISAAGKELSEAFKQKTSEILSHAHA
ALDQPLPTTLKKQEEKEILKSQLDSLLGLYHLLDWFAVDESNEVDPEFSARLTGIKLEMEPSLS
FYNKARNYATKKPYSVEKFKLNFQMPTLASGWDVNKEKNNGAILFVKNGLYYLGIMPKQKGRYK
ALSFEPTEKTSEGFDKMYYDYFPDAAKMIPKCSTQLKAVTAHFQTHTTPILLSNNFIEPLEITK
EIYDLNNPEKEPKKFQTAYAKKTGDQKGYREALCKWIDFTRDFLSKYTKTTSIDLSSLRPSSQY
KDLGEYYAELNPLLYHISFQRIAEKEIMDAVETGKLYLFQIYNKDFAKGHHGKPNLHTLYWTGL
FSPENLAKTSIKLNGQAELFYRPKSRMKRMAHRLGEKMLNKKLKDQKTPIPDTLYQELYDYVNH
RLSHDLSDEARALLPNVITKEVSHEIIKDRRFTSDKFFFHVPITLNYQAANSPSKFNQRVNAYL
KEHPETPIIGIDRGERNLIYITVIDSTGKILEQRSLNTIQQFDYQKKLDNREKERVAARQAWSV
VGTIKDLKQGYLSQVIHEIVDLMIHYQAVVVLENLNFGFKSKRIGIAEKAVYQQFEKMLIDKLN
CLVLKDYPAEKVGGVLNPYQLTDQFTSFAKMGTQSGFLFYVPAPYTSKIDPLTGFVDPFVWKTI
KNHESRKHFLEGFDFLHYDVKTGDFILHFKMNRNLSFQRGLPGFMPAWDIVFEKNETQFDAKGT
PFIAGKRIVPVIENHRFTGRYRDLYPANELIALLEEKGIVFRDGSNILPKLLENDDSHAIDTMV
ALIRSVLQMRNSNAATGEDYINSPVRDLNGVCFDSRFQNPEWPMDADANGAYHIALKGQLLLNH
LKESKDLKLQNGISNQDWLAYIQELRNGRSSDDEATADSQHAAPPKKKRKVGGSGGSGGSGGSG
GSGGSGGSGGSLEHHHHHH
-Cpf1 variant 3 amino acid sequence
SEQ ID NO: 61
MTQFEGFTNLYQVSKTLRFELIPQGKTLKHIQEQGFIEEDKARNDHYKELKPIIDRIYKTYADQ
CLQLVQLDWENLSAAIDSYRKEKTEETRNALIEEQATYRNAIHDYFIGRIDNLTDAINKRHAEI
YKGLFKAELFNGKVLKQLGTVTTTEHENALLRSFDKFTTYFSGFYENRKNVFSAEDISTAIPHR
IVQDNFPKFKENCHIFTRLITAVPSLREHFENVKKAIGIFVSTSIEEVFSFPFYNQLLTQTQID
LYNQLLGGISREAGTEKIKGLNEVLNLAIQKNDETAHIIASLPHRFIPLFKQILSDRNTLSFIL
EEFKSDEEVIQSFCKYKTLLRNENVLETAEALFNELNSIDLTHIFISHKKLETISSALCDHWDT
LRNALYERRISELTGKITKSAKEKVQRSLKHEDINLQEIISAAGKELSEAFKQKTSEILSHAHA
ALDQPLPTTLKKQEEKEILKSQLDSLLGLYHLLDWFAVDESNEVDPEFSARLTGIKLEMEPSLS
FYNKARNYATKKPYSVEKFKLNFQRPTLASGWDVNKEKNNGAILFVKNGLYYLGIMPKQKGRYK
ALSFEPTEKTSEGFDKMYYDYFPDAAKMIPKCSTQLKAVTAHFQTHTTPILLSNNFIEPLEITK
EIYDLNNPEKEPKKFQTAYAKKTGDQKGYREALCKWIDFTRDFLSKYTKTTSIDLSSLRPSSQY
KDLGEYYAELNPLLYHISFQRIAEKEIMDAVETGKLYLFQIYNKDFAKGHHGKPNLHTLYWTGL
FSPENLAKTSIKLNGQAELFYRPKSRMKRMAARLGEKMLNKKLKDQKTPIPDTLYQELYDYVNH
RLSHDLSDEARALLPNVITKEVSHEIIKDRRFTSDKFLFHVPITLNYQAANSPSKFNQRVNAYL
KEHPETPIIGIDRGERNLIYITVIDSTGKILEQRSLNTIQQFDYQKKLDNREKERVAARQAWSV
VGTIKDLKQGYLSQVIHEIVDLMIHYQAVVVLENLNFGFKSKRIGIAEKAVYQQFEKMLIDKLN
CLVLKDYPAEKVGGVLNPYQLTDQFTSFAKMGTQSGFLFYVPAPYTSKIDPLTGFVDPFVWKTI
KNHESRKHFLEGFDFLHYDVKTGDFILHFKMNRNLSFQRGLPGFMPAWDIVFEKNETQFDAKGT
PFIAGKRIVPVIENHRFTGRYRDLYPANELIALLEEKGIVFRDGSNILPKLLENDDSHAIDTMV
ALIRSVLQMRNSNAATGEDYINSPVRDLNGVCFDSRFQNPEWPMDADANGAYHIALKGQLLLNH
LKESKDLKLQNGISNQDWLAYIQELRNGRSSDDEATADSQHAAPPKKKRKVGGSGGSGGSGGSG
GSGGSGGSGGSLEHHHHHH
-Cpf1 variant 4 amino acid sequence
SEQ ID NO: 62
MTQFEGFTNLYQVSKTLRFELIPQGKTLKHIQEQGFIEEDKARNDHYKELKPIIDRIYKTYADQ
CLQLVQLDWENLSAAIDSYRKEKTEETRNALIEEQATYRNAIHDYFIGRTDNLTDAINKRHAEI
YKGLFKAELFNGKVLKQLGTVTTTEHENALLRSFDKFTTYFSGFYENRKNVFSAEDISTAIPHR
IVQDNFPKFKENCHIFTRLITAVPSLREHFENVKKAIGIFVSTSIEEVFSFPFYNQLLTQTQID
LYNQLLGGISREAGTEKIKGLNEVLNLAIQKNDETAHIIASLPHRFIPLFKQILSDRNTLSFIL
EEFKSDEEVIQSFCKYKTLLRNENVLETAEALFNELNSIDLTHIFISHKKLETISSALCDHWDT
LRNALYERRISELIGKITKSAKEKVQRSLKHEDINLQEIISAAGKELSEAFKQKTSEILSHAHA
ALDQPLPTTLKKQEEKEILKSQLDSLLGLYHLLDWFAVDESNEVDPEFSARLTGIKLEMEPSLS
FYNKARNYATKKPYSVEKFKLNFQRPTLASGWDVNKEKNNGAILFVKNGLYYLGIMPKQKGRYK
ALSFEPTEKTSEGFDKMYYDYFPDAAKMIPKCSTQLKAVTAHFQTHTTPILLSNNFIEPLEITK
EIYDLNNPEKEPKKFQTAYAKKTGDQKGYREALCKWIDFTRDFLSKYTKTTSIDLSSLRPSSQY
KDLGEYYAELNPLLYHISFQRIAEKEIMDAVETGKLYLFQIYNKDFAKGHHGKPNLHTLYWTGL
FSPENLAKTSIKLNGQAELFYRPKSRMKRMAARLGEKMLNKKLKDQKTPIPDTLYQELYDYVNH
RLSHDLSDEARALLPNVITKEVSHEIIKDRRFTSDKFLFHVPITLNYQAANSPSKENQRVNAYL
KEHPETPIIGIDRGERNLIYITVIDSTGKILEQRSLNTIQQFDYQKKLDNREKERVAARQAWSV
VGTIKDLKQGYLSQVIHEIVDLMIHYQAVVVLENLNFGFKSKRTGIAEKAVYQQFEKMLIDKLN
CLVLKDYPAEKVGGVLNPYQLTDQFTSFAKMGTQSGFLFYVPAPYTSKIDPLTGFVDPFVWKTI
KNHESRKHFLEGFDFLHYDVKTGDFILHFKMNRNLSFQRGLPGFMPAWDIVFEKNETQFDAKGT
PFIAGKRIVPVIENHRFTGRYRDLYPANELIALLEEKGIVFRDGSNILPKLLENDDSHAIDTMV
ALIRSVLQMRNSNAATGEDYINSPVRDLNGVCFDSRFQNPEWPMDADANGAYHIALKGQLLLNH
LKESKDLKLQNGISNQDWLAYIQELRNGRSSDDEATADSQHAAPPKKKRKV
-Cpf1 variant 5 amino acid sequence
SEQ ID NO: 63
MTQFEGFTNLYQVSKTLRFELIPQGKTLKHIQEQGFIEEDKARNDHYKELKPIIDRIYKTYADQ
CLQLVQLDWENLSAAIDSYRKEKTEETRNALIEEQATYRNAIHDYFIGRIDNLTDAINKRHAEI
YKGLFKAELFNGKVLKQLGTVTTTEHENALLRSFDKFTTYFSGFYENRKNVFSAEDISTAIPHR
IVQDNFPKFKENCHIFTRLITAVPSLREHFENVKKAIGIFVSTSIEEVFSFPFYNQLLTQTQID
LYNQLLGGISREAGTEKIKGLNEVLNLAIQKNDETAHIIASLPHRFIPLFKQILSDRNTLSFIL
EEFKSDEEVIQSFCKYKTLLRNENVLETAEALFNELNSIDLTHIFISHKKLETISSALCDHWDT
LRNALYERRISELTGKITKSAKEKVQRSLKHEDINLQEIISAAGKELSEAFKQKTSEILSHAHA
ALDQPLPTTLKKQEEKEILKSQLDSLLGLYHLLDWFAVDESNEVDPEFSARLTGIKLEMEPSLS
FYNKARNYATKKPYSVEKFKLNFQRPTLASGWDVNKEKNNGAILFVKNGLYYLGIMPKQKGRYK
ALSFEPTEKTSEGFDKMYYDYFPDAAKMIPKCSTQLKAVTAHFQTHTTPILLSNNFIEPLEITK
EIYDLNNPEKEPKKFQTAYAKKIGDQKGYREALCKWIDFTRDFLSKYTKITSIDLSSLRPSSQY
KDLGEYYAELNPLLYHISFQRIAEKEIMDAVETGKLYLFQIYNKDFAKGHHGKPNLHTLYWTGL
FSPENLAKTSIKLNGQAELFYRPKSRMKRMAHRLGEKMLNKKLKDQKTPIPDTLYQELYDYVNH
RLSHDLSDEARALLPNVITKEVSHEIIKDRRFTSDKFLFHVPITLNYQAANSPSKFNQRVNAYL
KEHPETPIIGIDRGERNLIYITVIDSTGKILEQRSLNTIQQFDYQKKLDNREKERVAARQAWSV
VGTIKDLKQGYLSQVIHEIVDLMIHYQAVVVLENLNFGFKSKRTGIAEKAVYQQFEKMLIDKLN
CLVLKDYPAEKVGGVLNPYQLTDQFTSFAKMGTQSGFLFYVPAPYTSKIDPLTGFVDPFVWKTI
KNHESRKHFLEGFDFLHYDVKTGDFILHFKMNRNLSFQRGLPGFMPAWDIVFEKNETQFDAKGT
PFIAGKRIVPVIENHRFTGRYRDLYPANELIALLEEKGIVFRDGSNILPKLLENDDSHAIDTMV
ALIRSVLQMRNSNAATGEDYINSPVRDLNGVCFDSRFQNPEWPMDADANGAYHIALKGQLLLNH
LKESKDLKLQNGISNQDWLAYIQELRNGRSSDDEATADSQHAAPPKKKRKV
-Cpf1 variant 6 amino acid sequence
SEQ ID NO: 64
MTQFEGFTNLYQVSKTLRFELIPQGKTLKHIQEQGFIEEDKARNDHYKELKPIIDRIYKTYADQ
CLQLVQLDWENLSAAIDSYRKEKTEETRNALIEEQATYRNAIHDYFIGRIDNLTDAINKRHAEI
YKGLFKAELFNGKVLKQLGTVTTTEHENALLRSFDKFTTYFSGFYENRKNVFSAEDISTAIPHR
IVQDNFPKFKENCHIFTRLITAVPSLREHFENVKKAIGIFVSTSIEEVFSFPFYNQLLTQTQID
LYNQLLGGISREAGTEKIKGLNEVLNLAIQKNDETAHIIASLPHRFIPLFKQILSDRNTLSFIL
EEFKSDEEVIQSFCKYKTLLRNENVLETAEALFNELNSIDLTHIFISHKKLETISSALCDHWDT
LRNALYERRISELTGKITKSAKEKVQRSLKHEDINLQEIISAAGKELSEAFKQKTSEILSHAHA
ALDQPLPTTLKKQEEKEILKSQLDSLLGLYHLLDWFAVDESNEVDPEFSARLTGIKLEMEPSLS
FYNKARNYATKKPYSVEKFKLNFQRPTLASGWDVNKEKNNGAILFVKNGLYYLGIMPKQKGRYK
ALSFEPTEKTSEGFDKMYYDYFPDAAKMIPKCSTQLKAVTAHFQTHTTPILLSNNFIEPLEITK
EIYDLNNPEKEPKKFQTAYAKKTGDQKGYREALCKWIDFTRDFLSKYTKTTSIDLSSLRPSSQY
KDLGEYYAELNPLLYHISFQRIAEKEIMDAVETGKLYLFQIYNKDFAKGHHGKPNLHTLYWTGL
FSPENLAKTSIKLNGQAELFYRPKSRMKRMAHRLGEKMLNKKLKDQKTPIPDTLYQELYDYVNH
RLSHDLSDEARALLPNVITKEVSHEIIKDRRFTSDKFLFHVPITLNYQAANSPSKFNQRVNAYL
KEHPETPIIGIDRGERNLIYITVIDSTGKILEQRSLNTIQQFDYQKKLDNREKERVAARQAWSV
VGTIKDLKQGYLSQVIHEIVDLMIHYQAVVVLENLNFGFKSKRTGIAEKAVYQQFEKMLIDKLN
CLVLKDYPAEKVGGVLNPYQLTDQFTSFAKMGTQSGFLFYVPAPYTSKIDPLIGFVDPFVWKTI
KNHESRKHFLEGFDFLHYDVKTGDFILHFKMNRNLSFQRGLPGFMPAWDIVFEKNETQFDAKGT
PFIAGKRIVPVIENHRFTGRYRDLYPANELIALLEEKGIVFRDGSNILPKLLENDDSHAIDTMV
ALIRSVLQMRNSNAATGEDYINSPVRDLNGVCFDSRFQNPEWPMDADANGAYHIALKGQLLLNH
LKESKDLKLQNGISNQDWLAYIQELRNGRSSDDEATADSQHAAPPKKKRKVGGSGGSGGSGGSG
GSGGSGGSGGSLEHHHHHH
-Cpf1 variant 7 amino acid sequence
SEQ ID NO: 65
MGRDPGKPIPNPLLGLDSTAPKKKRKVGIHGVPAATQFEGFTNLYQVSKTLRFELIPQGKTLKH
IQEQGFIEEDKARNDHYKELKPIIDRIYKTYADQCLQLVQLDWENLSAAIDSYRKEKTEETRNA
LIEEQATYRNAIHDYFIGRTDNLTDAINKRHAEIYKGLFKAELFNGKVLKQLGTVTTTEHENAL
LRSFDKFTTYFSGFYENRKNVFSAEDISTAIPHRIVQDNFPKFKENCHIFTRLITAVPSLREHF
ENVKKAIGIFVSTSIEEVFSFPFYNQLLTQTQIDLYNQLLGGISREAGTEKIKGLNEVLNLAIQ
KNDETAHIIASLPHRFIPLFKQILSDRNTLSFILEEFKSDEEVIQSFCKYKTLLRNENVLETAE
ALFNELNSIDLTHIFISHKKLETISSALCDHWDTLRNALYERRISELTGKITKSAKEKVQRSLK
HEDINLQEIISAAGKELSEAFKQKTSEILSHAHAALDQPLPTTLKKQEEKEILKSQLDSLLGLY
HLLDWFAVDESNEVDPEFSARLTGIKLEMEPSLSFYNKARNYATKKPYSVEKFKLNFQMPTLAS
GWDVNKEKNNGAILFVKNGLYYLGIMPKQKGRYKALSFEPTEKTSEGFDKMYYDYFPDAAKMIP
KCSTQLKAVTAHFQTHTTPILLSNNFIEPLEITKEIYDLNNPEKEPKKFQTAYAKKTGDQKGYR
EALCKWIDFTRDFLSKYTKITSIDLSSLRPSSQYKDLGEYYAELNPLLYHISFQRIAEKEIMDA
VETGKLYLFQIYNKDFAKGHHGKPNLHTLYWTGLFSPENLAKTSIKLNGQAELFYRPKSRMKRM
AHRLGEKMLNKKLKDQKTPIPDTLYQELYDYVNHRLSHDLSDEARALLPNVITKEVSHEIIKDR
RFTSDKFFFHVPITLNYQAANSPSKFNQRVNAYLKEHPETPIIGIDRGERNLIYITVIDSTGKI
LEQRSLNTIQQFDYQKKLDNREKERVAARQAWSVVGTIKDLKQGYLSQVIHEIVDLMIHYQAVV
VLENLNFGFKSKRTGIAEKAVYQQFEKMLIDKLNCLVLKDYPAEKVGGVLNPYQLTDQFTSFAK
MGTQSGFLFYVPAPYTSKIDPLIGFVDPFVWKTIKNHESRKHFLEGFDFLHYDVKTGDFILHFK
MNRNLSFQRGLPGFMPAWDIVFEKNETQFDAKGTPFIAGKRIVPVIENHRFTGRYRDLYPANEL
IALLEEKGIVFRDGSNILPKLLENDDSHAIDTMVALIRSVLQMRNSNAATGEDYINSPVRDLNG
VCFDSRFQNPEWPMDADANGAYHIALKGQLLLNHLKESKDLKLQNGISNQDWLAYIQELRNPKK
KRKVKLAAALEHHHHHH
-Exemplary AsCpf1 wild-type amino acid sequence
SEQ ID NO: 66
MTQFEGFTNLYQVSKTLRFELIPQGKTLKHIQEQGFIEEDKARNDHYKELKPIIDRIYKTYADQ
CLQLVQLDWENLSAAIDSYRKEKTEETRNALIEEQATYRNAIHDYFIGRTDNLTDAINKRHAEI
YKGLFKAELFNGKVLKQLGTVTTTEHENALLRSFDKFTTYFSGFYENRKNVFSAEDISTAIPHR
IVQDNFPKFKENCHIFTRLITAVPSLREHFENVKKAIGIFVSTSIEEVFSFPFYNQLLTQTQID
LYNQLLGGISREAGTEKIKGLNEVLNLAIQKNDETAHIIASLPHRFIPLFKQILSDRNTLSFIL
EEFKSDEEVIQSFCKYKTLLRNENVLETAEALFNELNSIDLTHIFISHKKLETISSALCDHWDT
LRNALYERRISELTGKITKSAKEKVQRSLKHEDINLQEIISAAGKELSEAFKQKTSEILSHAHA
ALDQPLPTTLKKQEEKEILKSQLDSLLGLYHLLDWFAVDESNEVDPEFSARLTGIKLEMEPSLS
FYNKARNYATKKPYSVEKFKLNFQMPTLASGWDVNKEKNNGAILFVKNGLYYLGIMPKQKGRYK
ALSFEPTEKTSEGFDKMYYDYFPDAAKMIPKCSTQLKAVTAHFQTHTTPILLSNNFIEPLEITK
EIYDLNNPEKEPKKFQTAYAKKTGDQKGYREALCKWIDFTRDFLSKYTKTTSIDLSSLRPSSQY
KDLGEYYAELNPLLYHISFQRIAEKEIMDAVETGKLYLFQIYNKDFAKGHHGKPNLHTLYWTGL
FSPENLAKTSIKLNGQAELFYRPKSRMKRMAHRLGEKMLNKKLKDQKTPIPDTLYQELYDYVNH
RLSHDLSDEARALLPNVITKEVSHEIIKDRRFTSDKFFFHVPITLNYQAANSPSKFNQRVNAYL
KEHPETPIIGIDRGERNLIYITVIDSTGKILEQRSLNTIQQFDYQKKLDNREKERVAARQAWSV
VGTIKDLKQGYLSQVIHEIVDLMIHYQAVVVLENLNFGFKSKRIGIAEKAVYQQFEKMLIDKLN
CLVLKDYPAEKVGGVLNPYQLTDQFTSFAKMGTQSGFLFYVPAPYTSKIDPLTGFVDPFVWKTI
KNHESRKHFLEGFDFLHYDVKTGDFILHFKMNRNLSFQRGLPGFMPAWDIVFEKNETQFDAKGT
PFIAGKRIVPVIENHRFTGRYRDLYPANELIALLEEKGIVFRDGSNILPKLLENDDSHAIDTMV
ALIRSVLQMRNSNAATGEDYINSPVRDLNGVCFDSRFQNPEWPMDADANGAYHIALKGQLLLNH
LKESKDLKLQNGISNQDWLAYIQELRN

[0349] Additional suitable nucleases and nuclease variants will be apparent to the skilled artisan based on the present disclosure in view of the knowledge in the art. Exemplary suitable nucleases may include, but are not limited to those provided in Table 5.

TABLE 5
Exemplary Suitable CRISPR/Cas Nucleases

| | Length | | |
|---|---|---|---|
| Nuclease | (A.A.) | PAM | Reference |
| SpCas9 | 1368 | NGG | Cong et al., Science 2013; |
| | | | 339(6121): 819-23 |
| SaCas9 | 1053 | NNGRRT | Ran et al., Nature 2015; |
| | | | 520(7546): 186-91. |
| (KKH) | 1067 | NNNRRT | Kleinstiver et al., Nat |
| SaCas9 | | | Biotechnol. 2015; 33(12): |
| | | | 1293-1298 |
| AsCpf1 | 1353 | TTTV | Zetsche et al., Nat Biotechnol. |
| (AsCas12a) | | | 2017; 35(1): 31-34. |
| LbCpf1 | 1274 | TTTV | Zetsche et al., Cell 2015; |
| (LbCas12a) | | | 163(3): 759-71. |
| CasX | 980 | TTC | Burstein et al., Nature 2017; |
| | | | 542(7640): 237-241. |
| CasY | 1200 | TA | Burstein et al., Nature 2017; |
| | | | 542(7640):237-241. |
| Cas12h1 | 870 | RTR | Yan et al., Science 2019; |
| | | | 363(6422): 88-91. |
| Cas12i1 | 1093 | TTN | Yan et al., Science 2019; |
| | | | 363(6422): 88-91. |
| Cas12i2 | 1054 | TTN | Yan et al., Science 2019; |
| | | | 363(6422): 88-91. |
| Cas12c1 | unknown | TG | Yan et al., Science 2019; |
| | | | 363(6422): 88-91. |
| Cas12c2 | unknown | TN | Yan et al., Science 2019; |
| | | | 363(6422): 88-91. |
| eSpCas9 | 1423 | NGG | Chen et al., Nature 2017; |
| | | | 550(7676): 407-410. |
| Cas9-HF1 | 1367 | NGG | Chen et al., Nature 2017; |
| | | | 550(7676): 407-410. |
| HypaCas9 | 1404 | NGG | Chen et al., Nature 2017; |
| | | | 550(7676): 407-410. |
| dCas9-Fokl | 1623 | NGG | U.S. Pat. No. 9,322,037 |
| Sniper-Cas9 | 1389 | NGG | Lee et al., Nat Commun. |
| | | | 2018; 9(1): 3048. |
| xCas9 | 1786 | NGG, NG, | Hu et al., Nature. 2018 Apr. |
| | | GAA, GAT | 5; 556(7699): 57-63. |
| AaCas12b | 1129 | TTN | Teng et al., Cell Discov. |
| | | | 2018; 4: 63. |
| evoCas9 | 1423 | NGG | Casini et al., Nat Biotechnol. |
| | | | 2018; 36(3): 265-271. |
| SpCas9-NG | 1423 | NG | Nishimasu et al., Science |
| | | | 2018; 361(6408): 1259-1262. |
| VRQR | 1368 | NGA | Li et al., The CRISPR |
| | | | Journal, 2018; 01: 01 |
| VRER | 1372 | NGCG | Kleinstiver et al., Nature |
| | | | 2016; 529(7587): 490-5. |
| NmeCas9 | 1082 | NNNNGATT | Amrani et al., Genome Biol. |
| | | | 2018; 19(1): 214. |
| CjCas9 | 984 | NNNNRYAC | Kim et al., Nat Commun. |
| | | | 2017; 8: 14500. |
| BhCas12b | 1108 | ATTN | Strecker et al., Nat Commun. |
| | | | 2019; 10(1): 212. |
| BhCas12b | 1108 | ATTN | Pausch et al., Science 2020; |
| V4 | | | 369(6501): 333-337. |
| CasΦ | 700-800 | TBN (where B | Pausch et al., Science 2020; |
| | | is G, T, or C) | 369(6501): 333-337. |

Guide RNA (gRNA) Molecules

[0350] Guide RNAs (gRNAs) of the present disclosure may be unimolecular (comprising a single RNA molecule, and referred to alternatively as chimeric), or modular (comprising more than one, and typically two, separate RNA molecules, such as a crRNA and a tracrRNA, which are usually associated with one another, for instance by duplexing). gRNAs and their component parts are described throughout the literature, for instance in Briner et al., Molecular Cell 2014; 56 (2): 333-339 (“Briner”), and in PCT Publication No. WO2016/073990A1.

[0351] In bacteria and archaea, type II CRISPR systems generally comprise an CRISPR/Cas nuclease protein such as Cas9, a CRISPR RNA (crRNA) that includes a 5′ region that is complementary to a foreign sequence, and a trans-activating crRNA (tracrRNA) that includes a 5′ region that is complementary to, and forms a duplex with, a 3′ region of the crRNA. While not intending to be bound by any theory, it is thought that this duplex facilitates the formation of—and is necessary for the activity of—the Cas9/gRNA complex. As type II CRISPR systems were adapted for use in gene editing, it was discovered that the crRNA and tracrRNA could be joined into a single unimolecular or chimeric guide RNA, in one non-limiting example, by means of a four nucleotide (e.g., GAAA) “tetraloop” or “linker” sequence bridging complementary regions of the crRNA (at its 3′ end) and the tracrRNA (at its 5′ end). See Mali et al., Science 2013; 339 (6121): 823-826 (“Mali”); Jiang et al., Nat Biotechnol. 2013; 31 (3): 233-239 (“Jiang”); and Jinek et al., Science 2012; 337 (6096): 816-821 (“Jinek 2012”).

[0352] Guide RNAs, whether unimolecular or modular, include a “targeting domain” that is fully or partially complementary to a target domain within a target sequence, such as a DNA sequence in the genome of a cell where editing is desired. Targeting domains are referred to by various names in the literature, including without limitation “guide sequences” (Hsu et al., Nat Biotechnol. 2013; 31 (9): 827-832. (“Hsu”)), “complementarity regions” (PCT Publication No. WO2016/073990A1), “spacers” (Briner) and generically as “crRNAs” (Jiang). Irrespective of the names they are given, targeting domains are typically 10-30 nucleotides in length, and in certain embodiments are 16-24 nucleotides in length (for instance, 16, 17, 18, 19, 20, 21, 22, 23 or 24 nucleotides in length), and are at or near the 5′ terminus of in the case of a Cas9 gRNA, and at or near the 3′ terminus in the case of a Cpf1 gRNA.

[0353] In addition to the targeting domains, gRNAs typically (but not necessarily, as discussed below) include a plurality of domains that may influence the formation or activity of gRNA/Cas9 complexes. For instance, as mentioned above, the duplexed structure formed by first and secondary complementarity domains of a gRNA (also referred to as a repeat: anti-repeat duplex) interacts with the recognition (REC) lobe of Cas9 and can mediate the formation of Cas9/gRNA complexes. Sec Nishimasu 2014 and 2015. It should be noted that the first and/or second complementarity domains may contain one or more poly-A tracts, which can be recognized by RNA polymerases as a termination signal. The sequence of the first and second complementarity domains are, therefore, optionally modified to eliminate these tracts and promote the complete in vitro transcription of gRNAs, for instance through the use of A-G swaps as described in Briner, or A-U swaps. These and other similar modifications to the first and second complementarity domains are within the scope of the present disclosure.

[0354] Along with the first and second complementarity domains, Cas9 gRNAs typically include two or more additional duplexed regions that are involved in nuclease activity in vivo but not necessarily in vitro. See Nishimasu 2015. A first stem-loop one near the 3′ portion of the second complementarity domain is referred to variously as the “proximal domain,” (PCT Publication No. WO2016/073990A1) “stem loop 1” (Nishimasu 2014 and 2015) and the “nexus” (Briner). One or more additional stem loop structures are generally present near the 3′ end of the gRNA, with the number varying by species: S. pyogenes gRNAs typically include two 3′ stem loops (for a total of four stem loop structures including the repeat: anti-repeat duplex), while S. aureus and other species have only one (for a total of three stem loop structures). A description of conserved stem loop structures (and gRNA structures more generally) organized by species is provided in Briner.

[0355] While the foregoing description has focused on gRNAs for use with Cas9, it should be appreciated that other CRISPR/Cas nucleases have been (or may in the future be) discovered or invented which utilize gRNAs that differ in some ways from those described to this point. For instance, Cpf1 (“CRISPR from Prevotella and Franciscella 1”) which is also called Cas12a is a CRISPR/Cas nuclease that does not require a tracrRNA to function (scc Zetsche et al., Cell 2015; 163:759-771 (“Zetsche I”)). A gRNA for use in a Cpf1 genome editing system generally includes a targeting domain and a complementarity domain (alternately referred to as a “handle”). It should also be noted that, in gRNAs for use with Cpf1, the targeting domain is usually present at or near the 3′ end, rather than the 5′ end as described above in connection with Cas9 gRNAs (the handle is at or near the 5′ end of a Cpf1 gRNA).

[0356] Those of skill in the art will appreciate, however, that although structural differences may exist between gRNAs from different prokaryotic species, or between Cpf1 and Cas9 gRNAs, the principles by which gRNAs operate are generally consistent. Because of this consistency of operation, gRNAs can be defined, in broad terms, by their targeting domain sequences, and skilled artisans will appreciate that a given targeting domain sequence can be incorporated in any suitable gRNA, including a unimolecular or chimeric gRNA, or a gRNA that includes one or more chemical modifications and/or sequential modifications (substitutions, additional nucleotides, truncations, etc.). Thus, for economy of presentation in this disclosure, gRNAs may be described solely in terms of their targeting domain sequences.

[0357] More generally, skilled artisans will appreciate that some aspects of the present disclosure relate to systems, methods and compositions that can be implemented using multiple CRISPR/Cas nucleases. For this reason, unless otherwise specified, the term gRNA should be understood to encompass any suitable gRNA that can be used with any CRISPR/Cas nuclease, and not only those gRNAs that are compatible with a particular species of Cas9 or Cpf1. By way of illustration, the term gRNA can, in certain embodiments, include a gRNA for use with any CRISPR/Cas nuclease occurring in a Class 2 CRISPR system, such as a type II or type V or CRISPR system, or an CRISPR/Cas nuclease derived or adapted therefrom.

[0358] In some embodiments a method or system of the present disclosure may use more than one gRNA. In some embodiments, two or more gRNAs may be used to create two or more double strand breaks in the genome of a cell. In some embodiments, a multiplexed editing strategy may be used that targets two or more essential genes at the same time with two or more knock-in cassettes. In some such embodiments, the two or more knock-in cassettes may comprise different exogenous cargo sequences, e.g., different knock-in cassettes may encode different gene products of interest and thus the edited cells will express a plurality of gene products of interest from different knock-in cassettes targeted to different loci.

[0359] In some embodiments using more than one gRNA, a double-strand break may be caused by a dual-gRNA paired “nickase” strategy. In some embodiments for selecting gRNAs, including the determination for which gRNAs can be used for the dual-gRNA paired “nickase” strategy, gRNA pairs should be oriented on the DNA such that PAMs are facing out and cutting with the D10A Cas9 nickase will result in 5′ overhangs.

[0360] In some embodiments, a method or system of the present disclosure may use a prime editing gRNA (pegRNA) in conjunction with a prime editor (PE). As is well known in the art, a pegRNA is substantially larger than standard gRNAs, e.g., in some embodiments longer than 50, 100, 150 or 250 nucleotides, e.g., as described in Anzalone et al., Nature 2019; 576:149-157, the entire contents of which are incorporated herein by reference. The pegRNA is a gRNA with a primer binding sequence (PBS) and a donor template containing the desired RNA sequence added at one of the termini, e.g., the 3′ end. The PE: pegRNA complex binds to the target DNA, and the nickase domain of the prime editor nicks only one strand, generating a flap. The PBS, located on the pegRNA, binds to the DNA flap and the edited RNA sequence is reverse transcribed using the reverse transcriptase domain of the prime editor. The edited strand is incorporated into the DNA at the end of the nicked flap, and the target DNA is repaired with the new reverse transcribed DNA. The original DNA segment is removed by a cellular endonuclease. This leaves one strand edited, and one strand unedited. In the newest PE systems, e.g., PE3 and PE3b, the unedited strand can be corrected to match the newly edited strand by using an additional standard gRNA. In this case, the unedited strand is nicked by a nickase and the newly edited strand is used as a template to repair the nick, thus completing the edit.

gRNA Design

[0361] Methods for selection and validation of target sequences as well as off-target analyses have been described previously, e.g., in Mali; Hsu; Fu et al., Nat Biotechnol 2014; 32(3): 279-84, Heigwer et al., Nat methods 2014; 11(2): 122-3; Bae et al., Bioinformatics 2014; 30(10): 1473-5; and Xiao et al. Bioinformatics 2014; 30(8): 1180-1182. As a non-limiting example, gRNA design may involve the use of a software tool to optimize the choice of potential target sequences corresponding to a user's target sequence, e.g., to minimize total off-target activity across the genome. While off-target activity is not limited to cleavage, the cleavage efficiency at each off-target sequence can be predicted, e.g., using an experimentally-derived weighting scheme. These and other guide selection methods are described in detail in PCT Publication No. WO2016/073990A1.

[0362] For example, methods for selection and validation of target sequences as well as off-target analyses can be performed using cas-offinder (Bae et al., Bioinformatics 2014; 30:1473-5). Cas-offinder is a tool that can quickly identify all sequences in a genome that have up to a specified number of mismatches to a guide sequence.

[0363] As another example, methods for scoring how likely a given sequence is to be an off-target (e.g., once candidate target sequences are identified) can be performed. An exemplary score includes a Cutting Frequency Determination (CFD) score, as described by Doench et al., Nat Biotechnol. 2016; 34:184-91.

gRNA Modifications

[0364] In certain embodiments, gRNAs as used herein may be modified or unmodified gRNAs. In certain embodiments, a gRNA may include one or more modifications. In certain embodiments, the one or more modifications may include a phosphorothioate linkage modification, a phosphorodithioate (PS2) linkage modification, a 2′-O-methyl modification, or combinations thereof. In certain embodiments, the one or more modifications may be at the 5′ end of the gRNA, at the 3′ end of the gRNA, or combinations thereof.

[0365] In certain embodiments, a gRNA modification may comprise one or more phosphorodithioate (PS2) linkage modifications.

[0366] In some embodiments, a gRNA used herein includes one or more or a stretch of deoxyribonucleic acid (DNA) bases, also referred to herein as a “DNA extension.” In some embodiments, a gRNA used herein includes a DNA extension at the 5′ end of the gRNA, the 3′ end of the gRNA, or a combination thereof. In certain embodiments, the DNA extension may be 1, 2, 3, 4, 5, 6, 7, 8, 9, 10, 11, 12, 13, 14, 15, 16, 17, 18, 19, 20, 21, 22, 23, 24, 25, 26, 27, 28, 29, 30, 31, 32, 33, 34, 35, 36, 37, 38, 39, 40, 41, 42, 43, 44, 45, 46, 47, 48, 49, 50, 51, 52, 53, 54, 55, 56, 57, 58, 59, 60, 61, 62, 63, 64, 65, 66, 67, 68, 69, 70, 71, 72, 73, 74, 75, 76, 77, 78, 79, 80, 81, 82, 83, 84, 85, 86, 87, 88, 89, 90, 91, 92, 93, 94, 95, 96, 97, 98, 99, or 100 DNA bases long. For example, in certain embodiments, the DNA extension may be 1, 2, 3, 4, 5, 10, 15, 20, or 25 DNA bases long. In certain embodiments, the DNA extension may include one or more DNA bases selected from adenine (A), guanine (G), cytosine (C), or thymine (T). In certain embodiments, the DNA extension includes the same DNA bases. For example, the DNA extension may include a stretch of adenine (A) bases. In certain embodiments, the DNA extension may include a stretch of thymine (T) bases. In certain embodiments, the DNA extension includes a combination of different DNA bases.

### Exemplary Suitable 5′ Extensions for Cpf1 Guide RNAs are Provided in Table 6 Below:

TABLE 6
Exemplary Cpf1 gRNA 5′ Extensions

| SEQ | | 5′ |
|---|---|---|
| ID NO: | 5′ extension sequence | modification |
| N/A | rCrUrUrUrU | +5 RNA |
| 67 | rArArGrArCrCrUrUrUrU | +10 RNA |
| 68 | rArUrGrUrGrUrUrUrUrUrGrUrCrArArArArGrArCr | +25 RNA |
| | CrUrUrUrU | |
| 69 | rArGrGrCrCrArGrCrUrUrGrCrCrGrGrUrUrUrUrUr | +60 RNA |
| | UrArGrUrCrGrUrGrCrUrGrCrUrUrCrArUrGrUrGr | |
| | UrUrUrUrUrGrUrCrArArArArGrArCrCrUrUrUrU | |
| N/A | CTTTT | +5 DNA |
| 70 | AAGACCTTTT | +10 DNA |
| 71 | ATGTGTTTTTGTCAAAAGACCTTTT | +25 DNA |
| 72 | AGGCCAGCTTGCCGGTTTTTTAGTCGTGCTGC | +60 DNA |
| | TTCATGTGTTTTTGTCAAAAGACCTTTT | |
| 73 | TTTTTGTCAAAAGACCTTTT | +20 DNA |
| 74 | GCTTCATGTGTTTTTGTCAAAAGACCTTTT | +30 DNA |
| 75 | GCCGGTTTTTTAGTCGTGCTGCTTCATGTGTT | +50 DNA |
| | TTTGTCAAAAGACCTTTT | |
| 76 | TAGTCGTGCTGCTTCATGTGTTTTTGTCAAAA | +40 DNA |
| | GACCTTTT | |
| 77 | C*C*GAAGTTTTCTTCGGTTTT | +20 DNA + |
| | | 2xPS |
| 78 | T*T*TTTCCGAAGTTTTCTTCGGTTTT | +25 DNA + |
| | | 2xPS |
| 79 | A*A*CGCTTTTTCCGAAGTTTTCTTCGGTTTT | +30 DNA + |
| | | 2xPS |
| 80 | G*C*GTTGTTTTCAACGCTTTTTCCGAAGTTTT | +41 DNA + |
| | CTTCGGTTTT | 2xPS |
| 81 | G*G*CTTCTTTTGAAGCCTTTTTGCGTTGTTTT | +62 DNA + |
| | CAACGCTTTTTCCGAAGTTTTCTTCGGTTTT | 2xPS |
| 82 | A*T*GTGTTTTTGTCAAAAGACCTTTT | +25 DNA + |
| | | 2xPS |
| 83 | AAAAAAAAAAAAAAAAAAAAAAAAA | +25 A |
| 84 | TTTTTTTTTTTTTTTTTTTTTTTTT | +25 T |
| 85 | mA*mU*rGrUrGrUrUrUrUrUrGrUrCrArArArArGr | +25 RNA + |
| | ArCrCrUrUrUrU | 2xPS |
| 86 | mA*mA*rArArArArArArArArArArArArArArArAr | PolyA RNA + |
| | ArArArArArArA | 2xPS |
| 87 | mU*mU*rUrUrUrUrUrUrUrUrUrUrUrUrUrUrUrUr | PolyU RNA + |
| | UrUrUrUrUrUrU | 2xPS |

[0367] In certain embodiments, a gRNA used herein includes a DNA extension as well as a chemical modification, e.g., one or more phosphorothioate linkage modifications, one or more phosphorodithioate (PS2) linkage modifications, one or more 2′-O-methyl modifications, or one or more additional suitable chemical gRNA modification disclosed herein, or combinations thereof. In certain embodiments, the one or more modifications may be at the 5′ end of the gRNA, at the 3′ end of the gRNA, or combinations thereof.

[0368] Without wishing to be bound by theory, it is contemplated that any DNA extension may be used with any gRNA disclosed herein, so long as it does not hybridize to the target nucleic acid being targeted by the gRNA and it also exhibits an increase in editing at the target nucleic acid site relative to a gRNA which does not include such a DNA extension.

[0369] In some embodiments, a gRNA used herein includes one or more or a stretch of ribonucleic acid (RNA) bases, also referred to herein as an “RNA extension.” In some embodiments, a gRNA used herein includes an RNA extension at the 5′ end of the gRNA, the 3′ end of the gRNA, or a combination thereof. In certain embodiments, the RNA extension may be 1, 2, 3, 4, 5, 6, 7, 8, 9, 10, 11, 12, 13, 14, 15, 16, 17, 18, 19, 20, 21, 22, 23, 24, 25, 26, 27, 28, 29, 30, 31, 32, 33, 34, 35, 36, 37, 38, 39, 40, 41, 42, 43, 44, 45, 46, 47, 48, 49, 50, 51, 52, 53, 54, 55, 56, 57, 58, 59, 60, 61, 62, 63, 64, 65, 66, 67, 68, 69, 70, 71, 72, 73, 74, 75, 76, 77, 78, 79, 80, 81, 82, 83, 84, 85, 86, 87, 88, 89, 90, 91, 92, 93, 94, 95, 96, 97, 98, 99, or 100 RNA bases long. For example, in certain embodiments, the RNA extension may be 1, 2, 3, 4, 5, 10, 15, 20, or 25 RNA bases long. In certain embodiments, the RNA extension may include one or more RNA bases selected from adenine (rA), guanine (rG), cytosine (rC), or uracil (rU), in which the “r” represents RNA, 2′-hydroxy. In certain embodiments, the RNA extension includes the same RNA bases. For example, the RNA extension may include a stretch of adenine (rA) bases. In certain embodiments, the RNA extension includes a combination of different RNA bases. In certain embodiments, a gRNA used herein includes an RNA extension as well as one or more phosphorothioate linkage modifications, one or more phosphorodithioate (PS2) linkage modifications, one or more 2′-O-methyl modifications, one or more additional suitable gRNA modification, e.g., chemical modification, disclosed herein, or combinations thereof. In certain embodiments, the one or more modifications may be at the 5′ end of the gRNA, at the 3′ end of the gRNA, or combinations thereof. In certain embodiments, a gRNA including a RNA extension may comprise a sequence set forth herein.

[0370] It is contemplated that gRNAs used herein may also include an RNA extension and a DNA extension. In certain embodiments, the RNA extension and DNA extension may both be at the 5′ end of the gRNA, the 3′ end of the gRNA, or a combination thereof. In certain embodiments, the RNA extension is at the 5′ end of the gRNA and the DNA extension is at the 3′ end of the gRNA. In certain embodiments, the RNA extension is at the 3′ end of the gRNA and the DNA extension is at the 5′ end of the gRNA.

[0371] In some embodiments, a gRNA which includes a modification. e.g., a DNA extension at the 5′ end and/or a chemical modification as disclosed herein, is complexed with a CRISPR/Cas nuclease, e.g., an AsCpf1 nuclease, to form an RNP, which is then employed to edit a target cell, e.g., a pluripotent stem cell or a progeny thereof.

[0372] Certain exemplary modifications discussed in this section can be included at any position within a gRNA sequence including, without limitation at or near the 5′ end (e.g., within 1-10, 1-5, or 1-2 nucleotides of the 5′ end) and/or at or near the 3′ end (e.g., within 1-10, 1-5, or 1-2 nucleotides of the 3′ end). In some cases, modifications are positioned within functional motifs, such as the repeat-anti-repeat duplex of a Cas9 gRNA, a stem loop structure of a Cas9 or Cpf1 gRNA, and/or a targeting domain of a gRNA.

[0373] As one example, the 5′ end of a gRNA can include a eukaryotic mRNA cap structure or cap analog (e.g., a G (5′) ppp (5′) G cap analog, a m7G (5′) ppp (5′) G cap analog, or a 3′-O-Me-m7G (5′) ppp (5′) G anti reverse cap analog (ARCA)), as shown below:

[chemical structure]

The cap or cap analog can be included during either chemical or enzymatic synthesis of the gRNA.

[0374] Along similar lines, the 5′ end of the gRNA can lack a 5′ triphosphate group. For instance, in vitro transcribed gRNAs can be phosphatase-treated (e.g., using calf intestinal alkaline phosphatase) to remove a 5′ triphosphate group.

[0375] Another common modification involves the addition, at the 3′ end of a gRNA, of a plurality (e.g., 1-10, 10-20, or 25-200) of adenine (A) residues referred to as a polyA tract. The polyA tract can be added to a gRNA during chemical or enzymatic synthesis, using a polyadenosine polymerase (e.g., E. coli Poly(A) Polymerase).

[0376] Guide RNAs can be modified at a 3′ terminal U ribose. For example, the two terminal hydroxyl groups of the U ribose can be oxidized to aldehyde groups and a concomitant opening of the ribose ring to afford a modified nucleoside as shown below:

[chemical structure]

wherein “U” can be an unmodified or modified uridine.

[0377] The 3′ terminal U ribose can be modified with a 2′3′ cyclic phosphate as shown below:

[chemical structure]

wherein “U” can be an unmodified or modified uridine.

[0378] Guide RNAs can contain 3′ nucleotides that can be stabilized against degradation, e.g., by incorporating one or more of the modified nucleotides described herein. In certain embodiments, uridines can be replaced with modified uridines, e.g., 5-(2-amino) propyl uridine, and 5-bromo uridine, or with any of the modified uridines described herein; adenosines and guanosines can be replaced with modified adenosines and guanosines, e.g., with modifications at the 8-position, e.g., 8-bromo guanosine, or with any of the modified adenosines or guanosines described herein.

[0379] In certain embodiments, sugar-modified ribonucleotides can be incorporated into a gRNA. e.g., wherein the 2′ OH-group is replaced by a group selected from H, —OR, —R (wherein R can be, e.g., alkyl, cycloalkyl, aryl, aralkyl, heteroaryl or sugar), halo, —SH, —SR (wherein R can be, e.g., alkyl, cycloalkyl, aryl, aralkyl, heteroaryl or sugar), amino (wherein amino can be, e.g., NH₂, alkylamino, dialkylamino, heterocyclyl, arylamino, diarylamino, heteroarylamino, diheteroarylamino, or amino acid); or cyano (—CN). In certain embodiments, the phosphate backbone can be modified as described herein, e.g., with a phosphothioate (PhTx) group. In certain embodiments, one or more of the nucleotides of the gRNA can each independently be a modified or unmodified nucleotide including, but not limited to 2′-sugar modified, such as, 2′-O-methyl, 2′-O-methoxyethyl, or 2′-Fluoro modified including, e.g., 2′-F or 2′-O-methyl, adenosine (A), 2′-F or 2′-O-methyl, cytidine (C), 2′-F or 2′-O-methyl, uridine (U), 2′-F or 2′-O-methyl, thymidine (T), 2′-F or 2′-O-methyl, guanosine (G), 2′-O-methoxyethyl-5-methyluridine (Teo), 2′-O-methoxyethyladenosine (Aco). 2′-O-methoxyethyl-5-methylcytidine (m5Ceo), and any combinations thereof.

[0380] Guide RNAs can also include “locked” nucleic acids (LNA) in which the 2′ OH-group can be connected, e.g., by a C1-6 alkylene or C1-6 heteroalkylene bridge, to the 4′ carbon of the same ribose sugar. Any suitable moiety can be used to provide such bridges, including without limitation methylene, propylene, ether, or amino bridges: O-amino (wherein amino can be, e.g., NH₂, alkylamino, dialkylamino, heterocyclyl, arylamino, diarylamino, heteroarylamino, or diheteroarylamino, ethylenediamine, or polyamino) and aminoalkoxy or O(CH₂)ₙ-amino (wherein amino can be, e.g., NH₂, alkylamino, dialkylamino, heterocyclyl, arylamino, diarylamino, heteroarylamino, or diheteroarylamino, ethylenediamine, or polyamino).

[0381] In certain embodiments, a gRNA can include a modified nucleotide which is multicyclic (e.g., tricyclo; and “unlocked” forms, such as glycol nucleic acid (GNA) (e.g., R-GNA or S-GNA, where ribose is replaced by glycol units attached to phosphodiester bonds), or threose nucleic acid (TNA, where ribose is replaced with α-L-threofuranosyl-(3′→2′)).

[0382] Generally, gRNAs include the sugar group ribose, which is a 5-membered ring having an oxygen. Exemplary modified gRNAs can include, without limitation, replacement of the oxygen in ribose (e.g., with sulfur(S), selenium (Se), or alkylene, such as, e.g., methylene or ethylene); addition of a double bond (e.g., to replace ribose with cyclopentenyl or cyclohexenyl); ring contraction of ribose (e.g., to form a 4-membered ring of cyclobutane or oxetane); ring expansion of ribose (e.g., to form a 6- or 7-membered ring having an additional carbon or heteroatom, such as for example, anhydrohexitol, altritol, mannitol, cyclohexanyl, cyclohexenyl, and morpholino that also has a phosphoramidate backbone). Although the majority of sugar analog alterations are localized to the 2′ position, other sites are amenable to modification, including the 4′ position. In certain embodiments, a gRNA comprises a 4′-S, 4′-Se or a 4′-C-aminomethyl-2′-O-Me modification.

[0383] In certain embodiments, deaza nucleotides, e.g., 7-deaza-adenosine, can be incorporated into a gRNA. In certain embodiments, O- and N-alkylated nucleotides, e.g., N6-methyl adenosine, can be incorporated into a gRNA. In certain embodiments, one or more or all of the nucleotides in a gRNA are deoxynucleotides.

[0384] Guide RNAs can also include one or more cross-links between complementary regions of the crRNA (at its 3′ end) and the tracrRNA (at its 5′ end) (e.g., within a “tetraloop” structure and/or positioned in any stem loop structure occurring within a gRNA). A variety of linkers are suitable for use. For example, guide RNAs can include common linking moieties including, without limitation, polyvinylether, polyethylene, polypropylene, polyethylene glycol (PEG), polyvinyl alcohol (PVA), polyglycolide (PGA), polylactide (PLA), polycaprolactone (PCL), and copolymers thereof.

[0385] In some embodiments, a bifunctional cross-linker is used to link a 5′ end of a first gRNA fragment and a 3′ end of a second gRNA fragment, and the 3′ or 5′ ends of the gRNA fragments to be linked are modified with functional groups that react with the reactive groups of the cross-linker. In general, these modifications comprise one or more of amine, sulfhydryl, carboxyl, hydroxyl, alkene (e.g., a terminal alkene), azide and/or another suitable functional group. Multifunctional (e.g. bifunctional) cross-linkers are also generally known in the art, and may be either heterofunctional or homofunctional, and may include any suitable functional group, including without limitation isothiocyanate, isocyanate, acyl azide, an NHS ester, sulfonyl chloride, tosyl ester, tresyl ester, aldehyde, amine, epoxide, carbonate (e.g., Bis(p-nitrophenyl) carbonate), aryl halide, alkyl halide, imido ester, carboxylate, alkyl phosphate, anhydride, fluorophenyl ester, HOBt ester, hydroxymethyl phosphine, O-methylisourea, DSC, NHS carbamate, glutaraldehyde, activated double bond, cyclic hemiacetal. NHS carbonate, imidazole carbamate, acyl imidazole, methylpyridinium ether, azlactone, cyanate ester, cyclic imidocarbonate, chlorotriazine, dehydroazepine, 6-sulfo-cytosine derivatives, maleimide, aziridine, TNB thiol, Ellman's reagent, peroxide, vinylsulfone, phenylthioester, diazoalkanes, diazoacetyl, epoxide, diazonium, benzophenone, anthraquinone, diazo derivatives, diazirine derivatives, psoralen derivatives, alkene, phenyl boronic acid, etc. In some embodiments, a first gRNA fragment comprises a first reactive group and the second gRNA fragment comprises a second reactive group. For example, the first and second reactive groups can each comprise an amine moiety, which are crosslinked with a carbonate-containing bifunctional crosslinking reagent to form a urea linkage. In other instances, (a) the first reactive group comprises a bromoacetyl moiety and the second reactive group comprises a sulfhydryl moiety, or (b) the first reactive group comprises a sulfhydryl moiety and the second reactive group comprises a bromoacetyl moiety, which are crosslinked by reacting the bromoacetyl moiety with the sulfhydryl moiety to form a bromoacetyl-thiol linkage. These and other cross-linking chemistries are known in the art, and are summarized in the literature, including by Greg T. Hermanson, Bioconjugate Techniques, 3rd Ed. 2013, published by Academic Press.

[0386] Additional suitable gRNA modifications will be apparent to those of ordinary skill in the art based on the present disclosure. Suitable gRNA modifications include, for example, those described in PCT Publication No. WO2019070762A1 entitled “MODIFIED CPF1 GUIDE RNA;” in PCT Publication No. WO2016089433A1 entitled “GUIDE RNA WITH CHEMICAL MODIFICATIONS;” in PCT Publication No. WO2016164356A1 entitled “CHEMICALLY MODIFIED GUIDE RNAS FOR CRISPR/CAS-MEDIATED GENE REGULATION;” and in PCT Publication No. WO2017053729A1 entitled “NUCLEASE-MEDIATED GENOME EDITING OF PRIMARY CELLS AND ENRICHMENT THEREOF;” the entire contents of each of which are incorporated herein by reference.

Exemplary gRNAs

[0387] Non-limiting examples of guide RNAs suitable for certain embodiments embraced by the present disclosure are provided herein, for example, in the Tables below. Those of ordinary skill in the art will be able to envision suitable guide RNA sequences for a specific nuclease, e.g., a Cas9 or Cpf1 nuclease, from the disclosure of the targeting domain sequence, either as a DNA or RNA sequence. For example, a guide RNA comprising a targeting sequence consisting of RNA nucleotides would include the RNA sequence corresponding to the targeting domain sequence provided as a DNA sequence, and this contain uracil instead of thymidine nucleotides. For example, a guide RNA comprising a targeting domain sequence consisting of RNA nucleotides, and described by the DNA sequence TCTGCAGAAATGTTCCCCGT (SEQ ID NO: 88) would have a targeting domain of the corresponding RNA sequence UCUGCAGAAAUGUUCCCCGU (SEQ ID NO: 89). As will be apparent to the skilled artisan, such a targeting sequence would be linked to a suitable guide RNA scaffold, e.g., a crRNA scaffold sequence or a chimeric crRNA/tracrRNA scaffold sequence. Suitable gRNA scaffold sequences are known to those of ordinary skill in the art. For AsCpf1, for example, a suitable scaffold sequence comprises the sequence UAAUUUCUACUCUUGUAGAU (SEQ ID NO: 90), added to the 5′-terminus of the targeting domain. In the example above, this would result in a Cpf1 guide RNA of the sequence UAAUUUCUACUCUUGUAGAUUCUGCAGAAAUGUUCCCCGU (SEQ ID NO: 91). Those of skill in the art would further understand how to modify such a guide RNA, e.g., by adding a DNA extension (e.g., in the example above, adding a 25-mer DNA extension as described herein would result, for example, in a guide RNA of the sequence ATGTGTTTTTGTCAAAAGACCTTTTrUrArArUrUrUrCrUrArCrUrCrUrUrGrUrArGrArUrUr CrUrGrCrArGrArArArUrGrUrUrCrCrCrCrGrU (SEQ ID NO: 92)). It will be understood that the exemplary targeting sequences provided herein are not limiting, and additional suitable sequences. e.g., variants of the specific sequences disclosed herein, will be apparent to the skilled artisan based on the present disclosure in view of the general knowledge in the art.

[0388] In some embodiments the gRNA for use in the disclosure is a gRNA targeting TGFβRII (TGFβRII gRNA). In some embodiments, the gRNA targeting TGFβRII is one or more of the gRNAs described in Table 7.

TABLE 7
Exemplary TGFβRII gRNAs

| | gRNA Targeting Domain | | | SEQ ID |
|---|---|---|---|---|
| Name | Sequence (DNA) | Length | Enzyme | NO: |
| TGFBR24326 | CAGGACGATGTGCAGCGGCC | 20 | AsCpf1 RR | 29 |
| TGFBR24327 | ACCGCACGTTCAGAAGTCGG | 20 | AsCpf1 RR | 30 |
| TGFBR24328 | ACAACTGTGTAAATTTTGTG | 20 | AsCpf1 RR | 31 |
| TGFBR24329 | CAACTGTGTAAATTTTGTGA | 20 | AsCpf1 RR | 32 |
| TGFBR24330 | ACCTGTGACAACCAGAAATC | 20 | AsCpf1 RR | 33 |
| TGFBR24331 | CCTGTGACAACCAGAAATCC | 20 | AsCpf1 RR | 34 |
| TGFBR24332 | TGTGGCTTCTCACAGATGGA | 20 | AsCpf1 RR | 35 |
| TGFBR24333 | TCTGTGAGAAGCCACAGGAA | 20 | AsCpf1 RR | 36 |
| TGFBR24334 | AAGCTCCCCTACCATGACTT | 20 | AsCpf1 RR | 37 |
| TGFBR24335 | GAATAAAGTCATGGTAGGGG | 20 | AsCpf1 RR | 38 |
| TGFBR24336 | AGAATAAAGTCATGGTAGGG | 20 | AsCpf1 RR | 39 |
| TGFBR24337 | CTACCATGACTTTATTCTGG | 20 | AsCpf1 RR | 40 |
| TGFBR24338 | TACCATGACTTTATTCTGGA | 20 | AsCpf1 RR | 41 |
| TGFBR24339 | TAATGCACTTTGGAGAAGCA | 20 | AsCpf1 RR | 42 |
| TGFBR24340 | TTCATAATGCACTTTGGAGA | 20 | AsCpf1 RR | 43 |
| TGFBR24341 | AAGTGCATTATGAAGGAAAA | 20 | AsCpf1 RR | 44 |
| TGFBR24342 | TGTGTTCCTGTAGCTCTGAT | 20 | AsCpf1 RR | 45 |
| TGFBR24343 | TGTAGCTCTGATGAGTGCAA | 20 | AsCpf1 RR | 46 |
| TGFBR24344 | AGTGACAGGCATCAGCCTCC | 20 | AsCpf1 RR | 47 |
| TGFBR24345 | AGTGGTGGCAGGAGGCTGAT | 20 | AsCpf1 RR | 48 |
| TGFBR24346 | AGGTTGAACTCAGCTTCTGC | 20 | AsCpf1 RR | 49 |
| TGFBR24347 | CAGGTTGAACTCAGCTTCTG | 20 | AsCpf1 RR | 50 |
| TGFBR24348 | ACCTGGGAAACCGGCAAGAC | 20 | AsCpf1 RR | 51 |
| TGFBR24349 | CGTCTTGCCGGTTTCCCAGG | 20 | AsCpf1 RR | 52 |
| TGFBR24350 | GCGTCTTGCCGGTTTCCCAG | 20 | AsCpf1 RR | 53 |
| TGFBR24351 | TGAGCTTCCGCGTCTTGCCG | 20 | AsCpf1 RR | 54 |
| TGFBR24352 | GCGAGCACTGTGCCATCATC | 20 | AsCpf1 RR | 55 |
| TGFBR24353 | GGATGATGGCACAGTGCTCG | 20 | AsCpf1 RR | 56 |
| TGFBR24354 | AGGATGATGGCACAGTGCTC | 20 | AsCpf1 RR | 57 |
| TGFBR24355 | CGTGTGCCAACAACATCAAC | 20 | AsCpf1 RR | 58 |
| TGFBR24356 | GCTCAATGGGCAGCAGCTCT | 20 | AsCpf1 RR | 59 |
| TGFBR24357 | ACCAGGGTGTCCAGCTCAAT | 20 | AsCpf1 RR | 60 |
| TGFBR24358 | CACCAGGGTGTCCAGCTCAA | 20 | AsCpf1 RR | 61 |
| TGFBR24359 | CCACCAGGGTGTCCAGCTCA | 20 | AsCpf1 RR | 62 |
| TGFBR24360 | GCTTGGCCTTATAGACCTCA | 20 | AsCpf1 RR | 63 |
| TGFBR24361 | GAGCAGTTTGAGACAGTGGC | 20 | AsCpf1 RR | 64 |
| TGFBR24362 | AGAGGCATACTCCTCATAGG | 20 | AsCpf1 RR | 65 |
| TGFBR24363 | CTATGAGGAGTATGCCTCTT | 20 | AsCpf1 RR | 66 |
| TGFBR24364 | AAGAGGCATACTCCTCATAG | 20 | AsCpf1 RR | 67 |
| TGFBR24365 | TATGAGGAGTATGCCTCTTG | 20 | AsCpf1 RR | 68 |
| TGFBR24366 | GATTGATGTCTGAGAAGATG | 20 | AsCpf1 RR | 69 |
| TGFBR24367 | CTCCTCAGCCGTCAGGAACT | 20 | AsCpf1 RR | 70 |
| TGFBR24368 | GTTCCTGACGGCTGAGGAGC | 20 | AsCpf1 RR | 71 |
| TGFBR24369 | GCTCCTCAGCCGTCAGGAAC | 20 | AsCpf1 RR | 72 |
| TGFBR24370 | TGACGGCTGAGGAGCGGAAG | 20 | AsCpf1 RR | 73 |
| TGFBR24371 | TCTTCCGCTCCTCAGCCGTC | 20 | AsCpf1 RR | 74 |
| TGFBR24372 | AACTCCGTCTTCCGCTCCTC | 20 | AsCpf1 RR | 75 |
| TGFBR24373 | CAACTCCGTCTTCCGCTCCT | 20 | AsCpf1 RR | 76 |
| TGFBR24374 | CCAACTCCGTCTTCCGCTCC | 20 | AsCpf1 RR | 77 |
| TGFBR24375 | ACGCCAAGGGCAACCTACAG | 20 | AsCpf1 RR | 78 |
| TGFBR24376 | CGCCAAGGGCAACCTACAGG | 20 | AsCpf1 RR | 79 |
| TGFBR24377 | AGCTGATGACATGCCGCGTC | 20 | AsCpf1 RR | 80 |
| TGFBR24378 | GGGCGAGGGAGCTGCCCAGC | 20 | AsCpf1 RR | 81 |
| TGFBR24379 | CGGGCGAGGGAGCTGCCCAG | 20 | AsCpf1 RR | 82 |
| TGFBR24380 | CCGGGCGAGGGAGCTGCCCA | 20 | AsCpf1 RR | 83 |
| TGFBR24381 | TCGCCCGGGGGATTGCTCAC | 20 | AsCpf1 RR | 84 |
| TGFBR24382 | ACATGGAGTGTGATCACTGT | 20 | AsCpf1 RR | 85 |
| TGFBR24383 | CAGTGATCACACTCCATGTG | 20 | AsCpf1 RR | 86 |
| TGFBR24384 | TGTGGGAGGCCCAAGATGCC | 20 | AsCpf1 RR | 87 |
| TGFBR24385 | TGTGCACGATGGGCATCTTG | 20 | AsCpf1 RR | 88 |
| TGFBR24386 | CGAGGATATTGGAGCTCTTG | 20 | AsCpf1 RR | 89 |
| TGFBR24387 | ATATCCTCGTGAAGAACGAC | 20 | AsCpf1 RR | 90 |
| TGFBR24388 | GACGCAGGGAAAGCCCAAAG | 20 | AsCpf1 RR | 91 |
| TGFBR24389 | CTGCGTCTGGACCCTACTCT | 20 | AsCpf1 RR | 92 |
| TGFBR24390 | TGCGTCTGGACCCTACTCTG | 20 | AsCpf1 RR | 93 |
| TGFBR24391 | CAGACAGAGTAGGGTCCAGA | 20 | AsCpf1 RR | 94 |
| TGFBR24392 | GCCAGCACGATCCCACCGCA | 20 | AsCpf1 RVR | 95 |
| TGFBR24393 | AAGGAAAAAAAAAAGCCTGG | 20 | AsCpf1 RVR | 96 |
| TGFBR24394 | ACACCAGCAATCCTGACTTG | 20 | AsCpf1 RVR | 97 |
| TGFBR24395 | ACTAGCAACAAGTCAGGATT | 20 | AsCpf1 RVR | 98 |
| TGFBR24396 | GCAACTCCCAGTGGTGGCAG | 20 | AsCpf1 RVR | 99 |
| TGFBR24397 | TGTCATCATCATCTTCTACT | 20 | AsCpf1 RVR | 100 |
| TGFBR24398 | GACCTCAGCAAAGCGACCTT | 20 | AsCpf1 RVR | 101 |
| TGFBR24399 | AGGCCAAGCTGAAGCAGAAC | 20 | AsCpf1 RVR | 102 |
| TGFBR24400 | AGGAGTATGCCTCTTGGAAG | 20 | AsCpf1 RVR | 103 |
| TGFBR24401 | CCTCTTGGAAGACAGAGAAG | 20 | AsCpf1 RVR | 104 |
| TGFBR24402 | TTCTCATGCTTCAGATTGAT | 20 | AsCpf1 RVR | 105 |
| TGFBR24403 | CTCGTGAAGAACGACCTAAC | 20 | AsCpf1 RVR | 106 |
| TGFbR2036 | GGCCGCTGCACATCGTCCTG | 20 | SpyCas9 | 107 |
| TGFbR2037 | GCGGGGTCTGCCATGGGTCG | 20 | SpyCas9 | 108 |
| TGFbR2038 | AGTTGCTCATGCAGGATTTC | 20 | SpyCas9 | 109 |
| TGFbR2039 | CCAGAATAAAGTCATGGTAG | 20 | SpyCas9 | 110 |
| TGFbR2040 | CCCCTACCATGACTTTATTC | 20 | SpyCas9 | 111 |
| TGFbR2041 | AAGTCATGGTAGGGGAGCTT | 20 | SpyCas9 | 112 |
| TGFbR2042 | AGTCATGGTAGGGGAGCTTG | 20 | SpyCas9 | 113 |
| TGFbR2043 | ATTGCACTCATCAGAGCTAC | 20 | SpyCas9 | 114 |
| TGFbR2044 | CCTAGAGTGAAGAGATTCAT | 20 | SpyCas9 | 115 |
| TGFbR2045 | CCAATGAATCTCTTCACTCT | 20 | SpyCas9 | 116 |
| TGFbR2046 | AAAGTCATGGTAGGGGAGCT | 20 | SpyCas9 | 117 |
| TGFbR2047 | GTGAGCAATCCCCCGGGCGA | 20 | SpyCas9 | 118 |
| TGFbR2048 | GTCGTTCTTCACGAGGATAT | 20 | SpyCas9 | 119 |
| TGFbR2049 | GCCGCGTCAGGTACTCCTGT | 20 | SpyCas9 | 120 |
| TGFbR2050 | GACGCGGCATGTCATCAGCT | 20 | SpyCas9 | 121 |
| TGFbR2051 | GCTTCTGCTGCCGGTTAACG | 20 | SpyCas9 | 122 |
| TGFbR2052 | GTGGATGACCTGGCTAACAG | 20 | SpyCas9 | 123 |
| TGFbR2053 | GTGATCACACTCCATGTGGG | 20 | SpyCas9 | 124 |
| TGFbR2054 | GCCCATTGAGCTGGACACCC | 20 | SpyCas9 | 125 |
| TGFbR2055 | GCGGTCATCTTCCAGGATGA | 20 | SpyCas9 | 126 |
| TGFbR2056 | GGGAGCTGCCCAGCTTGCGC | 20 | SpyCas9 | 127 |
| TGFbR2057 | GTTGATGTTGTTGGCACACG | 20 | SpyCas9 | 128 |
| TGFbR2058 | GGCATCTTGGGCCTCCCACA | 20 | SpyCas9 | 129 |
| TGFbR2059 | GCGGCATGTCATCAGCTGGG | 20 | SpyCas9 | 130 |
| TGFbR2060 | GCTCCTCAGCCGTCAGGAAC | 20 | SpyCas9 | 131 |
| TGFbR2061 | GCTGGTGTTATATTCTGATG | 20 | SpyCas9 | 132 |
| TGFbR2062 | CCGACTTCTGAACGTGCGGT | 20 | SpyCas9 | 133 |
| TGFbR2063 | TGCTGGCGATACGCGTCCAC | 20 | SpyCas9 | 134 |
| TGFbR2064 | CCCGACTTCTGAACGTGCGG | 20 | SpyCas9 | 135 |
| TGFbR2065 | CCACCGCACGTTCAGAAGTC | 20 | SpyCas9 | 136 |
| TGFbR2066 | TCACCCGACTTCTGAACGTG | 20 | SpyCas9 | 137 |
| TGFbR2067 | CCCACCGCACGTTCAGAAGT | 20 | SpyCas9 | 138 |
| TGFbR2068 | CGAGCAGCGGGGTCTGCCAT | 20 | SpyCas9 | 139 |
| TGFbR2069 | ACGAGCAGCGGGGTCTGCCA | 20 | SpyCas9 | 140 |
| TGFbR2070 | AGCGGGGTCTGCCATGGGTC | 20 | SpyCas9 | 141 |
| TGFbR2071 | CCTGAGCAGCCCCCGACCCA | 20 | SpyCas9 | 142 |
| TGFbR2072 | CCATGGGTCGGGGGCTGCTC | 20 | SpyCas9 | 143 |
| TGFbR2073 | AACGTGCGGTGGGATCGTGC | 20 | SpyCas9 | 144 |
| TGFbR2074 | GGACGATGTGCAGCGGCCAC | 20 | SpyCas9 | 145 |
| TGFbR2075 | GTCCACAGGACGATGTGCAG | 20 | SpyCas9 | 146 |
| TGFbR2076 | CATGGGTCGGGGGCTGCTCA | 20 | SpyCas9 | 147 |
| TGFbR2077 | CAGCGGGGTCTGCCATGGGT | 20 | SpyCas9 | 148 |
| TGFbR2078 | ATGGGTCGGGGGCTGCTCAG | 20 | SpyCas9 | 149 |
| TGFbR2079 | CGGGGTCTGCCATGGGTCGG | 20 | SpyCas9 | 150 |
| TGFbR2080 | AGGAAGTCTGTGTGGCTGTA | 20 | SpyCas9 | 151 |
| TGFbR2081 | CTCCATCTGTGAGAAGCCAC | 20 | SpyCas9 | 152 |
| TGFbR2082 | ATGATAGTCACTGACAACAA | 20 | SpyCas9 | 153 |
| TGFbR2083 | GATGCTGCAGTTGCTCATGC | 20 | SpyCas9 | 154 |
| TGFbR2084 | ACAGCCACACAGACTTCCTG | 20 | SpyCas9 | 155 |
| TGFbR2085 | GAAGCCACAGGAAGTCTGTG | 20 | SpyCas9 | 156 |
| TGFbR2086 | TTCCTGTGGCTTCTCACAGA | 20 | SpyCas9 | 157 |
| TGFbR2087 | CTGTGGCTTCTCACAGATGG | 20 | SpyCas9 | 158 |
| TGFbR2088 | TCACAAAATTTACACAGTTG | 20 | SpyCas9 | 159 |
| TGFbR2089 | GACAACATCATCTTCTCAGA | 20 | SpyCas9 | 160 |
| TGFbR2090 | TCCAGAATAAAGTCATGGTA | 20 | SpyCas9 | 161 |
| TGFbR2091 | GGTAGGGGAGCTTGGGGTCA | 20 | SpyCas9 | 162 |
| TGFbR2092 | TTCTCCAAAGTGCATTATGA | 20 | SpyCas9 | 163 |
| TGFbR2093 | CATCTTCCAGAATAAAGTCA | 20 | SpyCas9 | 164 |
| TGFbR2094 | CACATGAAGAAAGTCTCACC | 20 | SpyCas9 | 165 |
| TGFbR2095 | TTCCAGAATAAAGTCATGGT | 20 | SpyCas9 | 166 |
| TGFbR2096 | TTTTCCTTCATAATGCACTT | 20 | SpyCas9 | 167 |
| TGFBR24024 | CACAGTTGTGGAAACTTGAC | 20 | AsCpf1 | 168 |
| TGFBR24039 | CCCAACTCCGTCTTCCGCTC | 20 | AsCpf1 | 169 |
| TGFBR24040 | GGCTTTCCCTGCGTCTGGAC | 20 | AsCpf1 | 170 |
| TGFBR24036 | CTGAGGTCTATAAGGCCAAG | 20 | AsCpf1 | 171 |
| TGFBR24026 | TGATGTGAGATTTTCCACCT | 20 | AsCpf1 | 172 |
| TGFBR24038 | CCTATGAGGAGTATGCCTCT | 20 | AsCpf1 | 173 |
| TGFBR24033 | AAGTGACAGGCATCAGCCTC | 20 | AsCpf1 | 174 |
| TGFBR24028 | CCATGACCCCAAGCTCCCCT | 20 | AsCpf1 | 175 |
| TGFBR24031 | CTTCATAATGCACTTTGGAG | 20 | AsCpf1 | 176 |
| TGFBR24032 | TTCATGTGTTCCTGTAGCTC | 20 | AsCpf1 | 177 |
| TGFBR24029 | TTCTGGAAGATGCTGCTTCT | 20 | AsCpf1 | 178 |
| TGFBR24035 | CCCACCAGGGTGTCCAGCTC | 20 | AsCpf1 | 179 |
| TGFBR24037 | AGACAGTGGCAGTCAAGATC | 20 | AsCpf1 | 180 |
| TGFBR24041 | CCTGCGTCTGGACCCTACTC | 20 | AsCpf1 | 181 |
| TGFBR24025 | CACAACTGTGTAAATTTTGT | 20 | AsCpf1 | 182 |
| TGFBR24030 | GAGAAGCAGCATCTTCCAGA | 20 | AsCpf1 | 183 |
| TGFBR24027 | TGGTTGTCACAGGTGGAAAA | 20 | AsCpf1 | 184 |
| TGFBR24034 | CCAGGTTGAACTCAGCTTCT | 20 | AsCpf1 | 185 |
| TGFBR24043 | ATCACAAAATTTACACAGTTG | 21 | SauCas9 | 186 |
| TGFBR24065 | GGCATCAGCCTCCTGCCACCA | 21 | SauCas9 | 187 |
| TGFBR24110 | GTTAGCCAGGTCATCCACAGA | 21 | SauCas9 | 188 |
| TGFBR24099 | GCTGGGCAGCTCCCTCGCCCG | 21 | SauCas9 | 189 |
| TGFBR24064 | CAGGAGGCTGATGCCTGTCAC | 21 | SauCas9 | 190 |
| TGFBR24094 | GAGGAGCGGAAGACGGAGTTG | 21 | SauCas9 | 191 |
| TGFBR24108 | CGTCTGGACCCTACTCTGTCT | 21 | SauCas9 | 192 |
| TGFBR24058 | TTTTTCCTTCATAATGCACTT | 21 | SauCas9 | 193 |
| TGFBR24075 | CCATTGAGCTGGACACCCTGG | 21 | SauCas9 | 194 |
| TGFBR24057 | CTTCTCCAAAGTGCATTATGA | 21 | SauCas9 | 195 |
| TGFBR24103 | GCCCAAGATGCCCATCGTGCA | 21 | SauCas9 | 196 |
| TGFBR24060 | TCATGTGTTCCTGTAGCTCTG | 21 | SauCas9 | 197 |
| TGFBR24048 | GTGATGCTGCAGTTGCTCATG | 21 | SauCas9 | 198 |
| TGFBR24087 | TCTCATGCTTCAGATTGATGT | 21 | SauCas9 | 199 |
| TGFBR24081 | TCCCTATGAGGAGTATGCCTC | 21 | SauCas9 | 200 |
| TGFBR24044 | CATCACAAAATTTACACAGTT | 21 | SauCas9 | 201 |
| TGFBR24077 | ATTGAGCTGGACACCCTGGTG | 21 | SauCas9 | 202 |
| TGFBR24080 | CAGTCAAGATCTTTCCCTATG | 21 | SauCas9 | 203 |
| TGFBR24046 | AGGATTTCTGGTTGTCACAGG | 21 | SauCas9 | 204 |
| TGFBR24101 | TCCACAGTGATCACACTCCAT | 21 | SauCas9 | 205 |
| TGFBR24079 | AGCAGAACACTTCAGAGCAGT | 21 | SauCas9 | 206 |
| TGFBR24072 | CCGGCAAGACGCGGAAGCTCA | 21 | SauCas9 | 207 |
| TGFBR24074 | GATGTCAGAGCGGTCATCTTC | 21 | SauCas9 | 208 |
| TGFBR24062 | TCATTGCACTCATCAGAGCTA | 21 | SauCas9 | 209 |
| TGFBR24054 | CTTCCAGAATAAAGTCATGGT | 21 | SauCas9 | 210 |
| TGFBR24045 | AGATTTTCCACCTGTGACAAC | 21 | SauCas9 | 211 |
| TGFBR24049 | ACTGCAGCATCACCTCCATCT | 21 | SauCas9 | 212 |
| TGFBR24098 | AGCTGGGCAGCTCCCTCGCCC | 21 | SauCas9 | 213 |
| TGFBR24090 | TGACGGCTGAGGAGCGGAAGA | 21 | SauCas9 | 214 |
| TGFBR24076 | CATTGAGCTGGACACCCTGGT | 21 | SauCas9 | 215 |
| TGFBR24078 | AGCAAAGCGACCTTTCCCCAC | 21 | SauCas9 | 216 |
| TGFBR24067 | CGCGTTAACCGGCAGCAGAAG | 21 | SauCas9 | 217 |
| TGFBR24063 | GAAATATGACTAGCAACAAGT | 21 | SauCas9 | 218 |
| TGFBR24107 | AGACAGAGTAGGGTCCAGACG | 21 | SauCas9 | 219 |
| TGFBR24047 | CAGGATTTCTGGTTGTCACAG | 21 | SauCas9 | 220 |
| TGFBR24096 | CTCCTGTAGGTTGCCCTTGGC | 21 | SauCas9 | 221 |
| TGFBR24105 | ACAGAGTAGGGTCCAGACGCA | 21 | SauCas9 | 222 |
| TGFBR24056 | GCTTCTCCAAAGTGCATTATG | 21 | SauCas9 | 223 |
| TGFBR24068 | GCAGCAGAAGCTGAGTTCAAC | 21 | SauCas9 | 224 |
| TGFBR24093 | TGAGGAGCGGAAGACGGAGTT | 21 | SauCas9 | 225 |
| TGFBR24055 | CTTTGGAGAAGCAGCATCTTC | 21 | SauCas9 | 226 |
| TGFBR24053 | CTCCCCTACCATGACTTTATT | 21 | SauCas9 | 227 |
| TGFBR24106 | GACAGAGTAGGGTCCAGACGC | 21 | SauCas9 | 228 |
| TGFBR24092 | CTGAGGAGCGGAAGACGGAGT | 21 | SauCas9 | 229 |
| TGFBR24102 | GGGCATCTTGGGCCTCCCACA | 21 | SauCas9 | 230 |
| TGFBR24082 | CCAAGAGGCATACTCCTCATA | 21 | SauCas9 | 231 |
| TGFBR24051 | AGAATGACGAGAACATAACAC | 21 | SauCas9 | 232 |
| TGFBR24097 | CCTGACGCGGCATGTCATCAG | 21 | SauCas9 | 233 |
| TGFBR24073 | AGCGAGCACTGTGCCATCATC | 21 | SauCas9 | 234 |
| TGFBR24104 | GCAGGTTAGGTCGTTCTTCAC | 21 | SauCas9 | 235 |
| TGFBR24050 | ACCTCCATCTGTGAGAAGCCA | 21 | SauCas9 | 236 |
| TGFBR24052 | TAAAGTCATGGTAGGGGAGCT | 21 | SauCas9 | 237 |
| TGFBR24061 | TCAGAGCTACAGGAACACATG | 21 | SauCas9 | 238 |
| TGFBR24086 | TCTCAGACATCAATCTGAAGC | 21 | SauCas9 | 239 |
| TGFBR24066 | CATCAGCCTCCTGCCACCACT | 21 | SauCas9 | 240 |
| TGFBR24089 | CGCTCCTCAGCCGTCAGGAAC | 21 | SauCas9 | 241 |
| TGFBR24071 | AACCTGGGAAACCGGCAAGAC | 21 | SauCas9 | 242 |
| TGFBR24095 | TCCACGCCAAGGGCAACCTAC | 21 | SauCas9 | 243 |
| TGFBR24100 | GAGGTGAGCAATCCCCCGGGC | 21 | SauCas9 | 244 |
| TGFBR24069 | CAGCAGAAGCTGAGTTCAACC | 21 | SauCas9 | 245 |
| TGFBR24083 | TCCAAGAGGCATACTCCTCAT | 21 | SauCas9 | 246 |
| TGFBR24070 | AGCAGAAGCTGAGTTCAACCT | 21 | SauCas9 | 247 |
| TGFBR24088 | CCAGTTCCTGACGGCTGAGGA | 21 | SauCas9 | 248 |
| TGFBR24085 | AGGAGTATGCCTCTTGGAAGA | 21 | SauCas9 | 249 |
| TGFBR24084 | TTCCAAGAGGCATACTCCTCA | 21 | SauCas9 | 250 |
| TGFBR24042 | CAACTGTGTAAATTTTGTGAT | 21 | SauCas9 | 251 |
| TGFBR24059 | TGAAGGAAAAAAAAAAGCCTG | 21 | SauCas9 | 252 |
| TGFBR24091 | CGTCTTCCGCTCCTCAGCCGT | 21 | SauCas9 | 253 |
| TGFBR24109 | CCAGGTCATCCACAGACAGAG | 21 | SauCas9 | 254 |
| TGFBR2736 | GCCTAGAGTGAAGAGATTCAT | 21 | SpyCas9 | 255 |
| TGFBR2737 | GTTCTCCAAAGTGCATTATGA | 21 | SpyCas9 | 256 |
| TGFBR2738 | GCATCTTCCAGAATAAAGTCA | 21 | SpyCas9 | 257 |
| TGFBR2739 | TGATGTGAGATTTTCCACCTG | 21 | Cas12a | 1172 |

[0389] In some embodiments the gRNA for use in the disclosure is a gRNA targeting CISH (CISH gRNA). In some embodiments, the gRNA targeting CISH is one or more of the gRNAs described in Table 8.

TABLE 8
Exemplary CISH gRNAs

| | gRNA Targeting Domain | | | SEQ ID |
|---|---|---|---|---|
| Name | Sequence (DNA) | Length | Enzyme | NO: |
| CISH0873 | CAACCGTCTGGTGGCCGACG | 20 | SpyCas9 | 258 |
| CISH0874 | CAGGATCGGGGCTGTCGCTT | 20 | SpyCas9 | 259 |
| CISH0875 | TCGGGCCTCGCTGGCCGTAA | 20 | SpyCas9 | 260 |
| CISH0876 | GAGGTAGTCGGCCATGCGCC | 20 | SpyCas9 | 261 |
| CISH0877 | CAGGTGTTGTCGGGCCTCGC | 20 | SpyCas9 | 262 |
| CISH0878 | GGAGGTAGTCGGCCATGCGC | 20 | SpyCas9 | 263 |
| CISH0879 | GGCATACTCAATGCGTACAT | 20 | SpyCas9 | 264 |
| CISH0880 | CCGCCTTGTCATCAACCGTC | 20 | SpyCas9 | 265 |
| CISH0881 | AGGATCGGGGCTGTCGCTTC | 20 | SpyCas9 | 266 |
| CISH0882 | CCTTGTCATCAACCGTCTGG | 20 | SpyCas9 | 267 |
| CISH0883 | TACTCAATGCGTACATTGGT | 20 | SpyCas9 | 268 |
| CISH0884 | GGGTTCCATTACGGCCAGCG | 20 | SpyCas9 | 269 |
| CISH0885 | GGCACTGCTTCTGCGTACAA | 20 | SpyCas9 | 270 |
| CISH0886 | GGTTGATGACAAGGCGGCAC | 20 | SpyCas9 | 271 |
| CISH0887 | TGCTGGGGCCTTCCTCGAGG | 20 | SpyCas9 | 272 |
| CISH0888 | TTGCTGGCTGTGGAGCGGAC | 20 | SpyCas9 | 273 |
| CISH0889 | TTCTCCTACCTTCGGGAATC | 20 | SpyCas9 | 274 |
| CISH0890 | GACTGGCTTGGGCAGTTCCA | 20 | SpyCas9 | 275 |
| CISH0891 | CATGCAGCCCTTGCCTGCTG | 20 | SpyCas9 | 276 |
| CISH0892 | AGCAAAGGACGAGGTCTAGA | 20 | SpyCas9 | 277 |
| CISH0893 | GCCTGCTGGGGCCTTCCTCG | 20 | SpyCas9 | 278 |
| CISH0894 | CAGACTCACCAGATTCCCGA | 20 | SpyCas9 | 279 |
| CISH0895 | ACCTCGTCCTTTGCTGGCTG | 20 | SpyCas9 | 280 |
| CISH0896 | CTCACCAGATTCCCGAAGGT | 20 | SpyCas9 | 281 |
| CISH7048 | TACGCAGAAGCAGTGCCCGC | 20 | AsCpf1 | 282 |
| CISH7049 | AGGTGTACAGCAGTGGCTGG | 20 | AsCpf1 | 283 |
| CISH7050 | GGTGTACAGCAGTGGCTGGT | 20 | AsCpf1 | 284 |
| CISH7051 | CGGATGTGGTCAGCCTTGTG | 20 | AsCpf1 | 285 |
| CISH7052 | CACTGACAGCGTGAACAGGT | 20 | AsCpf1 | 286 |
| CISH7053 | ACTGACAGCGTGAACAGGTA | 20 | AsCpf1 | 287 |
| CISH7054 | GCTCACTCTCTGTCTGGGCT | 20 | AsCpf1 | 288 |
| CISH7055 | CTGGCTGTGGAGCGGACTGG | 20 | AsCpf1 | 289 |
| CISH7056 | GCTCTGACTGTACGGGGCAA | 20 | AsCpf1 RR | 290 |
| CISH7057 | AGCTCTGACTGTACGGGGCA | 20 | AsCpf1 RR | 291 |
| CISH7058 | ACAGTACCCCTTCCAGCTCT | 20 | AsCpf1 RR | 292 |
| CISH7059 | CGTCGGCCACCAGACGGTTG | 20 | AsCpf1 RR | 293 |
| CISH7060 | CCAGCCACTGCTGTACACCT | 20 | AsCpf1 RR | 294 |
| CISH7061 | ACCCCGGCCCTGCCTATGCC | 20 | AsCpf1 RR | 295 |
| CISH7062 | GGTATCAGCAGTGCAGGAGG | 20 | AsCpf1 RR | 296 |
| CISH7063 | GATGTGGTCAGCCTTGTGCA | 20 | AsCpf1 RR | 297 |
| CISH7064 | GGATGTGGTCAGCCTTGTGC | 20 | AsCpf1 RR | 298 |
| CISH7065 | GGCCACGCATCCTGGCCTTT | 20 | AsCpf1 RR | 299 |
| CISH7066 | GAAAGGCCAGGATGCGTGGC | 20 | AsCpf1 RR | 300 |
| CISH7067 | ACTGCTTGTCCAGGCCACGC | 20 | AsCpf1 RR | 301 |
| CISH7068 | TCTGGACTCCAACTGCTTGT | 20 | AsCpf1 RR | 302 |
| CISH7069 | GTCTGGACTCCAACTGCTTG | 20 | AsCpf1 RR | 303 |
| CISH7070 | GCTTCCGTCTGGACTCCAAC | 20 | AsCpf1 RR | 304 |
| CISH7071 | GACGGAAGCTGGAGTCGGCA | 20 | AsCpf1 RR | 305 |
| CISH7072 | CGCTGTCAGTGAAAACCACT | 20 | AsCpf1 RR | 306 |
| CISH7073 | CTGACAGCGTGAACAGGTAG | 20 | AsCpf1 RR | 307 |
| CISH7074 | TTACGGCCAGCGAGGCCCGA | 20 | AsCpf1 RR | 308 |
| CISH7075 | ATTACGGCCAGCGAGGCCCG | 20 | AsCpf1 RR | 309 |
| CISH7076 | GGAATCTGGTGAGTCTGAGG | 20 | AsCpf1 RR | 310 |
| CISH7077 | CCCTCAGACTCACCAGATTC | 20 | AsCpf1 RR | 311 |
| CISH7078 | CGAAGGTAGGAGAAGGTCTT | 20 | AsCpf1 RR | 312 |
| CISH7079 | GAAGGTAGGAGAAGGTCTTG | 20 | AsCpf1 RR | 313 |
| CISH7080 | GCACCTTTGGCTCACTCTCT | 20 | AsCpf1 RR | 314 |
| CISH7081 | TCGAGGAGGTGGCAGAGGGT | 20 | AsCpf1 RR | 315 |
| CISH7082 | TGGAACTGCCCAAGCCAGTC | 20 | AsCpf1 RR | 316 |
| CISH7083 | AGGGACGGGGCCCACAGGGG | 20 | AsCpf1 RR | 317 |
| CISH7084 | GGGACGGGGCCCACAGGGGC | 20 | AsCpf1 RR | 318 |
| CISH7085 | CTCCACAGCCAGCAAAGGAC | 20 | AsCpf1 RR | 319 |
| CISH7086 | CAGCCAGCAAAGGACGAGGT | 20 | AsCpf1 RR | 320 |
| CISH7087 | CTGCCTTCTAGACCTCGTCC | 20 | AsCpf1 RR | 321 |
| CISH7088 | CCTAAGGAGGATGCGCCTAG | 20 | AsCpf1 RVR | 322 |
| CISH7089 | TGGCCTCCTGCACTGCTGAT | 20 | AsCpf1 RVR | 323 |
| CISH7090 | AGCAGTGCAGGAGGCCACAT | 20 | AsCpf1 RVR | 324 |
| CISH7091 | CCGACTCCAGCTTCCGTCTG | 20 | AsCpf1 RVR | 325 |
| CISH7092 | GGGGTTCCATTACGGCCAGC | 20 | AsCpf1 RVR | 326 |
| CISH7093 | CACAGCAGATCCTCCTCTGG | 20 | AsCpf1 RVR | 327 |
| CISH7094 | ATTGCCCCGTACAGTCAGAG | 20 | SauCas9 | 328 |
| CISH7095 | CCCGTACAGTCAGAGCTGGA | 20 | SauCas9 | 329 |
| CISH7096 | TGGTGGAGGAGCAGGCAGTG | 20 | SauCas9 | 330 |
| CISH7097 | TCCTTAGGCATAGGCAGGGC | 20 | SauCas9 | 331 |
| CISH7098 | CGGCCCTGCCTATGCCTAAG | 20 | SauCas9 | 332 |
| CISH7099 | TAGGCATAGGCAGGGCCGGG | 20 | SauCas9 | 333 |
| CISH7100 | AGGCAGGGCCGGGGTGGGAG | 20 | SauCas9 | 334 |
| CISH7101 | GCAGGATCGGGGCTGTCGCT | 20 | SauCas9 | 335 |
| CISH7102 | CTGCACAAGGCTGACCACAT | 20 | SauCas9 | 336 |
| CISH7103 | TGCACAAGGCTGACCACATC | 20 | SauCas9 | 337 |
| CISH7104 | CTGACCACATCCGGAAAGGC | 20 | SauCas9 | 338 |
| CISH7105 | GGCCACGCATCCTGGCCTTT | 20 | SauCas9 | 339 |
| CISH7106 | GCGTGGCCTGGACAAGCAGT | 20 | SauCas9 | 340 |
| CISH7107 | GACAAGCAGTTGGAGTCCAG | 20 | SauCas9 | 34 |
| CISH7108 | GTTGGAGTCCAGACGGAAGC | 20 | SauCas9 | 342 |
| CISH7109 | ATGCGTACATTGGTGGGGCC | 20 | SauCas9 | 343 |
| CISH7110 | TGGCCCCACCAATGTACGCA | 20 | SauCas9 | 344 |
| CISH7111 | GCTACCTGTTCACGCTGTCA | 20 | SauCas9 | 345 |
| CISH7112 | TGACAGCGTGAACAGGTAGC | 20 | SauCas9 | 346 |
| CISH7113 | GTCGGGCCTCGCTGGCCGTA | 20 | SauCas9 | 347 |
| CISH7114 | GCACTTGCCTAGGCTGGTAT | 20 | SauCas9 | 348 |
| CISH7115 | GGGAATCTGGTGAGTCTGAG | 20 | SauCas9 | 349 |
| CISH7116 | CTCACCAGATTCCCGAAGGT | 20 | SauCas9 | 350 |
| CISH7117 | CTCCTACCTTCGGGAATCTG | 20 | SauCas9 | 351 |
| CISH7118 | CAAGACCTTCTCCTACCTTC | 20 | SauCas9 | 352 |
| CISH7119 | CCAAGACCTTCTCCTACCTT | 20 | SauCas9 | 353 |
| CISH7120 | GCCAAGACCTTCTCCTACCT | 20 | SauCas9 | 354 |
| CISH7121 | TATGCACAGCAGATCCTCCT | 20 | SauCas9 | 355 |
| CISH7122 | CAAAGGTGCTGGACCCAGAG | 20 | SauCas9 | 356 |
| CISH7123 | GGCTCACTCTCTGTCTGGGC | 20 | SauCas9 | 357 |
| CISH7124 | AGGGTACCCCAGCCCAGACA | 20 | SauCas9 | 358 |
| CISH7125 | AGAGGGTACCCCAGCCCAGA | 20 | SauCas9 | 359 |
| CISH7126 | GTACCCTCTGCCACCTCCTC | 20 | SauCas9 | 360 |
| CISH7127 | CCTTCCTCGAGGAGGTGGCA | 20 | SauCas9 | 361 |
| CISH7128 | ATGACTGGCTTGGGCAGTTC | 20 | SauCas9 | 362 |
| CISH7129 | GGCCCCTGTGGGCCCCGTCC | 20 | SauCas9 | 363 |
| CISH7130 | AGGACGAGGTCTAGAAGGCA | 20 | SauCas9 | 364 |
| CISH7131 | ACTGACAGCGTGAACAGGTAG | 21 | Cas12a | 1173 |

[0390] In some embodiments, the gRNA for use in the disclosure is a gRNA targeting B2M (B2M gRNA). In some embodiments, the gRNA targeting B2M is one or more of the gRNAs described in Table 9.

TABLE 9
Exemplary B2M gRNAs

| gRNA | gRNA Targeting Domain Target | | | SEQ ID |
|---|---|---|---|---|
| name | sequence (DNA) | Length | Enzyme | NO: |
| B2M1 | TATAAGTGGAGGCGTCGCGC | 20 | SpyCas9 | 365 |
| B2M2 | GGGCACGCGTTTAATATAAG | 20 | SpyCas9 | 366 |
| B2M3 | ACTCACGCTGGATAGCCTCC | 20 | SpyCas9 | 367 |
| B2M4 | GGCCGAGATGTCTCGCTCCG | 20 | SpyCas9 | 368 |
| B2M5 | CACGCGTTTAATATAAGTGG | 20 | SpyCas9 | 369 |
| B2M6 | AAGTGGAGGCGTCGCGCTGG | 20 | SpyCas9 | 370 |
| B2M7 | GAGTAGCGCGAGCACAGCTA | 20 | SpyCas9 | 371 |
| B2M8 | AGTGGAGGCGTCGCGCTGGC | 20 | SpyCas9 | 372 |
| B2M9 | GCCCGAATGCTGTCAGCTTC | 20 | SpyCas9 | 373 |
| B2M10 | CGCGAGCACAGCTAAGGCCA | 20 | SpyCas9 | 374 |
| B2M11 | CTCGCGCTACTCTCTCTTTC | 20 | SpyCas9 | 375 |
| B2M12 | GGCCACGGAGCGAGACATCT | 20 | SpyCas9 | 376 |
| B2M13 | CGTGAGTAAACCTGAATCTT | 20 | SpyCas9 | 377 |
| B2M14 | AGTCACATGGTTCACACGGC | 20 | SpyCas9 | 378 |
| B2M15 | AAGTCAACTTCAATGTCGGA | 20 | SpyCas9 | 379 |
| B2M16 | CAGTAAGTCAACTTCAATGT | 20 | SpyCas9 | 380 |
| B2M17 | ACCCAGACACATAGCAATTC | 20 | SpyCas9 | 381 |
| B2M18 | GCATACTCATCTTTTTCAGT | 20 | SpyCas9 | 382 |
| B2M19 | ACAGCCCAAGATAGTTAAGT | 20 | SpyCas9 | 383 |
| B2M20 | GGCATACTCATCTTTTTCAG | 20 | SpyCas9 | 384 |
| B2M21 | TTCCTGAAGCTGACAGCATT | 20 | SpyCas9 | 385 |
| B2M22 | TCACGTCATCCAGCAGAGAA | 20 | SpyCas9 | 386 |
| B2M23 | CAGCCCAAGATAGTTAAGTG | 20 | SpyCas9 | 387 |
| B2M-c1 | AAUUCUCUCUCCAUUCUU | 18 | AsCpf1 | 388 |
| B2M-c2 | AAUUCUCUCUCCAUUCUUC | 19 | AsCpf1 | 389 |
| B2M-c3 | AAUUCUCUCUCCAUUCUUCA | 20 | AsCpf1 | 390 |
| B2M-c4 | AAUUCUCUCUCCAUUCUUCAG | 21 | AsCpf1 | 391 |
| B2M-c5 | AAUUCUCUCUCCAUUCUUCAGU | 22 | AsCpf1 | 392 |
| B2M-c6 | AAUUCUCUCUCCAUUCUUCAGUA | 23 | AsCpf1 | 393 |
| B2M-c7 | AAUUCUCUCUCCAUUCUUCAGUAA | 24 | AsCpf1 | 394 |
| B2M-c8 | ACUUUCCAUUCUCUGCUG | 18 | AsCpf1 | 395 |
| B2M-c9 | ACUUUCCAUUCUCUGCUGG | 19 | AsCpf1 | 396 |
| B2M-c10 | ACUUUCCAUUCUCUGCUGGA | 20 | AsCpf1 | 397 |
| B2M-c11 | ACUUUCCAUUCUCUGCUGGAU | 21 | AsCpf1 | 398 |
| B2M-c12 | ACUUUCCAUUCUCUGCUGGAUG | 22 | AsCpf1 | 399 |
| B2M-c13 | ACUUUCCAUUCUCUGCUGGAUGA | 23 | AsCpf1 | 400 |
| B2M-c14 | ACUUUCCAUUCUCUGCUGGAUGAC | 24 | AsCpf1 | 401 |
| B2M-c15 | AGCAAGGACUGGUCUUUC | 18 | AsCpf1 | 402 |
| B2M-c16 | AGCAAGGACUGGUCUUUCU | 19 | AsCpf1 | 403 |
| B2M-c17 | AGCAAGGACUGGUCUUUCUA | 20 | AsCpf1 | 404 |
| B2M-c18 | AGCAAGGACUGGUCUUUCUAU | 21 | AsCpf1 | 405 |
| B2M-c19 | AGCAAGGACUGGUCUUUCUAUC | 22 | AsCpf1 | 406 |
| B2M-c20 | AGCAAGGACUGGUCUUUCUAUCU | 23 | AsCpf1 | 407 |
| B2M-c21 | AGCAAGGACUGGUCUUUCUAUCUC | 24 | AsCpf1 | 408 |
| B2M-c22 | AGUGGGGGUGAAUUCAGU | 18 | AsCpf1 | 409 |
| B2M-c23 | AGUGGGGGUGAAUUCAGUG | 19 | AsCpf1 | 410 |
| B2M-c24 | AGUGGGGGUGAAUUCAGUGU | 20 | AsCpf1 | 411 |
| B2M-c25 | AGUGGGGGUGAAUUCAGUGUA | 21 | AsCpf1 | 412 |
| B2M-c26 | AGUGGGGGUGAAUUCAGUGUAG | 22 | AsCpf1 | 413 |
| B2M-c27 | AGUGGGGGUGAAUUCAGUGUAGU | 23 | AsCpf1 | 414 |
| B2M-c28 | AGUGGGGGUGAAUUCAGUGUAGUA | 24 | AsCpf1 | 415 |
| B2M-c29 | AUCCAUCCGACAUUGAAG | 18 | AsCpf1 | 416 |
| B2M-c30 | AUCCAUCCGACAUUGAAGU | 19 | AsCpf1 | 417 |
| B2M-c31 | AUCCAUCCGACAUUGAAGUU | 20 | AsCpf1 | 418 |
| B2M-c32 | AUCCAUCCGACAUUGAAGUUG | 21 | AsCpf1 | 419 |
| B2M-c33 | AUCCAUCCGACAUUGAAGUUGA | 22 | AsCpf1 | 420 |
| B2M-c34 | AUCCAUCCGACAUUGAAGUUGAC | 23 | AsCpf1 | 421 |
| B2M-c35 | AUCCAUCCGACAUUGAAGUUGACU | 24 | AsCpf1 | 422 |
| B2M-c36 | CAAUUCUCUCUCCAUUCU | 18 | AsCpf1 | 423 |
| B2M-c37 | CAAUUCUCUCUCCAUUCUU | 19 | AsCpf1 | 424 |
| B2M-c38 | CAAUUCUCUCUCCAUUCUUC | 20 | AsCpf1 | 425 |
| B2M-c39 | CAAUUCUCUCUCCAUUCUUCA | 21 | AsCpf1 | 426 |
| B2M-c40 | CAAUUCUCUCUCCAUUCUUCAG | 22 | AsCpf1 | 427 |
| B2M-c41 | CAAUUCUCUCUCCAUUCUUCAGU | 23 | AsCpf1 | 428 |
| B2M-c42 | CAAUUCUCUCUCCAUUCUUCAGUA | 24 | AsCpf1 | 429 |
| B2M-c43 | CAGUGGGGGUGAAUUCAG | 18 | AsCpf1 | 430 |
| B2M-c44 | CAGUGGGGGUGAAUUCAGU | 19 | AsCpf1 | 431 |
| B2M-c45 | CAGUGGGGGUGAAUUCAGUG | 20 | AsCpf1 | 432 |
| B2M-c46 | CAGUGGGGGUGAAUUCAGUGU | 21 | AsCpf1 | 433 |
| B2M-c47 | CAGUGGGGGUGAAUUCAGUGUA | 22 | AsCpf1 | 434 |
| B2M-c48 | CAGUGGGGGUGAAUUCAGUGUAG | 23 | AsCpf1 | 435 |
| B2M-c49 | CAGUGGGGGUGAAUUCAGUGUAGU | 24 | AsCpf1 | 436 |
| B2M-c50 | CAUUCUCUGCUGGAUGAC | 18 | AsCpf1 | 437 |
| B2M-c51 | CAUUCUCUGCUGGAUGACG | 19 | AsCpf1 | 438 |
| B2M-c52 | CAUUCUCUGCUGGAUGACGU | 20 | AsCpf1 | 439 |
| B2M-c53 | CAUUCUCUGCUGGAUGACGUG | 21 | AsCpf1 | 440 |
| B2M-c54 | CAUUCUCUGCUGGAUGACGUGA | 22 | AsCpf1 | 441 |
| B2M-c55 | CAUUCUCUGCUGGAUGACGUGAG | 23 | AsCpf1 | 442 |
| B2M-c56 | CAUUCUCUGCUGGAUGACGUGAGU | 24 | AsCpf1 | 443 |
| B2M-c57 | CCCGAUAUUCCUCAGGUA | 18 | AsCpf1 | 444 |
| B2M-c58 | CCCGAUAUUCCUCAGGUAC | 19 | AsCpf1 | 445 |
| B2M-c59 | CCCGAUAUUCCUCAGGUACU | 20 | AsCpf1 | 446 |
| B2M-c60 | CCCGAUAUUCCUCAGGUACUC | 21 | AsCpf1 | 447 |
| B2M-c61 | CCCGAUAUUCCUCAGGUACUCC | 22 | AsCpf1 | 448 |
| B2M-c62 | CCCGAUAUUCCUCAGGUACUCCA | 23 | AsCpf1 | 449 |
| B2M-c63 | CCCGAUAUUCCUCAGGUACUCCAA | 24 | AsCpf1 | 450 |
| B2M-c64 | CCGAUAUUCCUCAGGUAC | 18 | AsCpf1 | 451 |
| B2M-c65 | CCGAUAUUCCUCAGGUACU | 19 | AsCpf1 | 452 |
| B2M-c66 | CCGAUAUUCCUCAGGUACUC | 20 | AsCpf1 | 453 |
| B2M-c67 | CCGAUAUUCCUCAGGUACUCC | 21 | AsCpf1 | 454 |
| B2M-c68 | CCGAUAUUCCUCAGGUACUCCA | 22 | AsCpf1 | 455 |
| B2M-c69 | CCGAUAUUCCUCAGGUACUCCAA | 23 | AsCpf1 | 456 |
| B2M-c70 | CCGAUAUUCCUCAGGUACUCCAAA | 24 | AsCpf1 | 457 |
| B2M-c71 | CUCACGUCAUCCAGCAGA | 18 | AsCpf1 | 458 |
| B2M-c72 | CUCACGUCAUCCAGCAGAG | 19 | AsCpf1 | 459 |
| B2M-c73 | CUCACGUCAUCCAGCAGAGA | 20 | AsCpf1 | 460 |
| B2M-c74 | CUCACGUCAUCCAGCAGAGAA | 21 | AsCpf1 | 461 |
| B2M-c75 | CUCACGUCAUCCAGCAGAGAAU | 22 | AsCpf1 | 462 |
| B2M-c76 | CUCACGUCAUCCAGCAGAGAAUG | 23 | AsCpf1 | 463 |
| B2M-c77 | CUCACGUCAUCCAGCAGAGAAUGG | 24 | AsCpf1 | 464 |
| B2M-c78 | CUGAAUUGCUAUGUGUCU | 18 | AsCpf1 | 465 |
| B2M-c79 | CUGAAUUGCUAUGUGUCUG | 19 | AsCpf1 | 466 |
| B2M-c80 | CUGAAUUGCUAUGUGUCUGG | 20 | AsCpf1 | 467 |
| B2M-c81 | CUGAAUUGCUAUGUGUCUGGG | 21 | AsCpf1 | 468 |
| B2M-c82 | CUGAAUUGCUAUGUGUCUGGGU | 22 | AsCpf1 | 469 |
| B2M-c83 | CUGAAUUGCUAUGUGUCUGGGUU | 23 | AsCpf1 | 470 |
| B2M-c84 | CUGAAUUGCUAUGUGUCUGGGUUU | 24 | AsCpf1 | 471 |
| B2M-c85 | GAGUACCUGAGGAAUAUC | 18 | AsCpf1 | 472 |
| B2M-c86 | GAGUACCUGAGGAAUAUCG | 19 | AsCpf1 | 473 |
| B2M-c87 | GAGUACCUGAGGAAUAUCGG | 20 | AsCpf1 | 474 |
| B2M-c88 | GAGUACCUGAGGAAUAUCGGG | 21 | AsCpf1 | 475 |
| B2M-c89 | GAGUACCUGAGGAAUAUCGGGA | 22 | AsCpf1 | 476 |
| B2M-c90 | GAGUACCUGAGGAAUAUCGGGAA | 23 | AsCpf1 | 477 |
| B2M-c91 | GAGUACCUGAGGAAUAUCGGGAAA | 24 | AsCpf1 | 478 |
| B2M-c92 | UAUCUCUUGUACUACACU | 18 | AsCpf1 | 479 |
| B2M-c93 | UAUCUCUUGUACUACACUG | 19 | AsCpf1 | 480 |
| B2M-c94 | UAUCUCUUGUACUACACUGA | 20 | AsCpf1 | 481 |
| B2M-c95 | UAUCUCUUGUACUACACUGAA | 21 | AsCpf1 | 482 |
| B2M-c96 | UAUCUCUUGUACUACACUGAAU | 22 | AsCpf1 | 483 |
| B2M-c97 | UAUCUCUUGUACUACACUGAAUU | 23 | AsCpf1 | 484 |
| B2M-c98 | UAUCUCUUGUACUACACUGAAUUC | 24 | AsCpf1 | 485 |
| B2M-c99 | UCAAUUCUCUCUCCAUUC | 18 | AsCpf1 | 486 |
| B2M-c100 | UCAAUUCUCUCUCCAUUCU | 19 | AsCpf1 | 487 |
| B2M-c101 | UCAAUUCUCUCUCCAUUCUU | 20 | AsCpf1 | 488 |
| B2M-c102 | UCAAUUCUCUCUCCAUUCUUC | 21 | AsCpf1 | 489 |
| B2M-c103 | UCAAUUCUCUCUCCAUUCUUCA | 22 | AsCpf1 | 490 |
| B2M-c104 | UCAAUUCUCUCUCCAUUCUUCAG | 23 | AsCpf1 | 491 |
| B2M-c105 | UCAAUUCUCUCUCCAUUCUUCAGU | 24 | AsCpf1 | 492 |
| B2M-c106 | UCACAGCCCAAGAUAGUU | 18 | AsCpf1 | 493 |
| B2M-c107 | UCACAGCCCAAGAUAGUUA | 19 | AsCpf1 | 494 |
| B2M-c108 | UCACAGCCCAAGAUAGUUAA | 20 | AsCpf1 | 495 |
| B2M-c109 | UCACAGCCCAAGAUAGUUAAG | 21 | AsCpf1 | 496 |
| B2M-c110 | UCACAGCCCAAGAUAGUUAAGU | 22 | AsCpf1 | 497 |
| B2M-c111 | UCACAGCCCAAGAUAGUUAAGUG | 23 | AsCpf1 | 498 |
| B2M-c112 | UCACAGCCCAAGAUAGUUAAGUGG | 24 | AsCpf1 | 499 |
| B2M-c113 | UCAGUGGGGGUGAAUUCA | 18 | AsCpf1 | 500 |
| B2M-c114 | UCAGUGGGGGUGAAUUCAG | 19 | AsCpf1 | 501 |
| B2M-c115 | UCAGUGGGGGUGAAUUCAGU | 20 | AsCpf1 | 502 |
| B2M-c116 | UCAGUGGGGGUGAAUUCAGUG | 21 | AsCpf1 | 503 |
| B2M-c117 | UCAGUGGGGGUGAAUUCAGUGU | 22 | AsCpf1 | 504 |
| B2M-c118 | UCAGUGGGGGUGAAUUCAGUGUA | 23 | AsCpf1 | 505 |
| B2M-c119 | UCAGUGGGGGUGAAUUCAGUGUAG | 24 | AsCpf1 | 506 |
| B2M-c120 | UGGCCUGGAGGCUAUCCA | 18 | AsCpf1 | 507 |
| B2M-c121 | UGGCCUGGAGGCUAUCCAG | 19 | AsCpf1 | 508 |
| B2M-c122 | UGGCCUGGAGGCUAUCCAGC | 20 | AsCpf1 | 509 |
| B2M-c123 | UGGCCUGGAGGCUAUCCAGCG | 21 | AsCpf1 | 510 |
| B2M-c124 | UGGCCUGGAGGCUAUCCAGCGU | 22 | AsCpf1 | 511 |
| B2M-c125 | UGGCCUGGAGGCUAUCCAGCGUG | 23 | AsCpf1 | 512 |
| B2M-c126 | UGGCCUGGAGGCUAUCCAGCGUGA | 24 | AsCpf1 | 513 |
| B2M-c127 | AUAGAUCGAGACAUGUAA | 18 | AsCpf1 | 514 |
| B2M-c128 | AUAGAUCGAGACAUGUAAG | 19 | AsCpf1 | 515 |
| B2M-c129 | AUAGAUCGAGACAUGUAAGC | 20 | AsCpf1 | 516 |
| B2M-c130 | AUAGAUCGAGACAUGUAAGCA | 21 | AsCpf1 | 517 |
| B2M-c131 | AUAGAUCGAGACAUGUAAGCAG | 22 | AsCpf1 | 518 |
| B2M-c132 | AUAGAUCGAGACAUGUAAGCAGC | 23 | AsCpf1 | 519 |
| B2M-c133 | AUAGAUCGAGACAUGUAAGCAGCA | 24 | AsCpf1 | 520 |
| B2M-c134 | CAUAGAUCGAGACAUGUA | 18 | AsCpf1 | 521 |
| B2M-c135 | CAUAGAUCGAGACAUGUAA | 19 | AsCpf1 | 522 |
| B2M-c136 | CAUAGAUCGAGACAUGUAAG | 20 | AsCpf1 | 523 |
| B2M-c137 | CAUAGAUCGAGACAUGUAAGC | 21 | AsCpf1 | 524 |
| B2M-c138 | CAUAGAUCGAGACAUGUAAGCA | 22 | AsCpf1 | 525 |
| B2M-c139 | CAUAGAUCGAGACAUGUAAGCAG | 23 | AsCpf1 | 526 |
| B2M-c140 | CAUAGAUCGAGACAUGUAAGCAGC | 24 | AsCpf1 | 527 |
| B2M-c141 | CUCCACUGUCUUUUUCAU | 18 | AsCpf1 | 528 |
| B2M-c142 | CUCCACUGUCUUUUUCAUA | 19 | AsCpf1 | 529 |
| B2M-c143 | CUCCACUGUCUUUUUCAUAG | 20 | AsCpf1 | 530 |
| B2M-c144 | CUCCACUGUCUUUUUCAUAGA | 21 | AsCpf1 | 531 |
| B2M-c145 | CUCCACUGUCUUUUUCAUAGAU | 22 | AsCpf1 | 532 |
| B2M-c146 | CUCCACUGUCUUUUUCAUAGAUC | 23 | AsCpf1 | 533 |
| B2M-c147 | CUCCACUGUCUUUUUCAUAGAUCG | 24 | AsCpf1 | 534 |
| B2M-c148 | UCAUAGAUCGAGACAUGU | 18 | AsCpf1 | 535 |
| B2M-c149 | UCAUAGAUCGAGACAUGUA | 19 | AsCpf1 | 536 |
| B2M-c150 | UCAUAGAUCGAGACAUGUAA | 20 | AsCpf1 | 537 |
| B2M-c151 | UCAUAGAUCGAGACAUGUAAG | 21 | AsCpf1 | 538 |
| B2M-c152 | UCAUAGAUCGAGACAUGUAAGC | 22 | AsCpf1 | 539 |
| B2M-c153 | UCAUAGAUCGAGACAUGUAAGCA | 23 | AsCpf1 | 540 |
| B2M-c154 | UCAUAGAUCGAGACAUGUAAGCAG | 24 | AsCpf1 | 541 |
| B2M-c155 | UCCACUGUCUUUUUCAUA | 18 | AsCpf1 | 542 |
| B2M-c156 | UCCACUGUCUUUUUCAUAG | 19 | AsCpf1 | 543 |
| B2M-c157 | UCCACUGUCUUUUUCAUAGA | 20 | AsCpf1 | 544 |
| B2M-c158 | UCCACUGUCUUUUUCAUAGAU | 21 | AsCpf1 | 545 |
| B2M-c159 | UCCACUGUCUUUUUCAUAGAUC | 22 | AsCpf1 | 546 |
| B2M-c160 | UCCACUGUCUUUUUCAUAGAUCG | 23 | AsCpf1 | 547 |
| B2M-c161 | UCCACUGUCUUUUUCAUAGAUCGA | 24 | AsCpf1 | 548 |
| B2M-c162 | UCUCCACUGUCUUUUUCA | 18 | AsCpf1 | 549 |
| B2M-c163 | UCUCCACUGUCUUUUUCAU | 19 | AsCpf1 | 550 |
| B2M-c164 | UCUCCACUGUCUUUUUCAUA | 20 | AsCpf1 | 551 |
| B2M-c165 | UCUCCACUGUCUUUUUCAUAG | 21 | AsCpf1 | 552 |
| B2M-c166 | UCUCCACUGUCUUUUUCAUAGA | 22 | AsCpf1 | 553 |
| B2M-c167 | UCUCCACUGUCUUUUUCAUAGAU | 23 | AsCpf1 | 554 |
| B2M-c168 | UCUCCACUGUCUUUUUCAUAGAUC | 24 | AsCpf1 | 555 |
| B2M-c169 | UUCUCCACUGUCUUUUUC | 18 | AsCpf1 | 556 |
| B2M-c170 | UUCUCCACUGUCUUUUUCA | 19 | AsCpf1 | 557 |
| B2M-c171 | UUCUCCACUGUCUUUUUCAU | 20 | AsCpf1 | 558 |
| B2M-c172 | UUCUCCACUGUCUUUUUCAUA | 21 | AsCpf1 | 559 |
| B2M-c173 | UUCUCCACUGUCUUUUUCAUAG | 22 | AsCpf1 | 560 |
| B2M-c174 | UUCUCCACUGUCUUUUUCAUAGA | 23 | AsCpf1 | 561 |
| B2M-c175 | UUCUCCACUGUCUUUUUCAUAGAU | 24 | AsCpf1 | 562 |
| B2M-c176 | UUUCUCCACUGUCUUUUU | 18 | AsCpf1 | 563 |
| B2M-c177 | UUUCUCCACUGUCUUUUUC | 19 | AsCpf1 | 564 |
| B2M-c178 | UUUCUCCACUGUCUUUUUCA | 20 | AsCpf1 | 565 |
| B2M-c179 | UUUCUCCACUGUCUUUUUCAU | 21 | AsCpf1 | 566 |
| B2M-c180 | UUUCUCCACUGUCUUUUUCAUA | 22 | AsCpf1 | 567 |
| B2M-c181 | UUUCUCCACUGUCUUUUUCAUAG | 23 | AsCpf1 | 568 |
| B2M-c182 | UUUCUCCACUGUCUUUUUCAUAGA | 24 | AsCpf1 | 569 |
| B2M-c183 | UUUUCUCCACUGUCUUUU | 18 | AsCpf1 | 570 |
| B2M-c184 | UUUUCUCCACUGUCUUUUU | 19 | AsCpf1 | 571 |
| B2M-c185 | UUUUCUCCACUGUCUUUUUC | 20 | AsCpf1 | 572 |
| B2M-c186 | UUUUCUCCACUGUCUUUUUCA | 21 | AsCpf1 | 573 |
| B2M-c187 | UUUUCUCCACUGUCUUUUUCAU | 22 | AsCpf1 | 574 |
| B2M-c188 | UUUUCUCCACUGUCUUUUUCAUA | 23 | AsCpf1 | 575 |
| B2M-c189 | UUUUCUCCACUGUCUUUUUCAUAG | 24 | AsCpf1 | 576 |

[0391] In some embodiments, the gRNA for use in the disclosure is a gRNA targeting PD1. gRNAs targeting B2M and PD1 for use in the disclosure are further described in WO2015161276 and WO2017152015 by Welstead et al.; both incorporated in their entirety herein by reference.

[0392] In some embodiments, the gRNA for use in the disclosure is a gRNA targeting NKG2A (NKG2A gRNA). In some embodiments, the gRNA targeting NKG2A is one or more of the gRNAs described in Table 10.

TABLE 10
Exemplary NKG2A gRNAs

| | gRNA Targeting Domain | | | SEQ ID |
|---|---|---|---|---|
| Name | Sequence (DNA) | Length | Enzyme | NO: |
| NKG2A55 | GAGGTAAAGCGTTTGCATTTG | 21 | AsCpf1 | 577 |
| NKG2A56 | CCTCTAAAGCTTATGCTTACA | 21 | AsCpf1 | 578 |
| NKG2A57 | AGTCGATTTACTTGTAGCACT | 21 | AsCpf1 | 579 |
| NKG2A58 | CTTGTAGCACTGCACAGTTAA | 21 | AsCpf1 | 580 |
| NKG2A59 | TCCATTACAGGATAAAAGACT | 21 | AsCpf1 | 581 |
| NKG2A60 | CTCCATTACAGGATAAAAGAC | 21 | AsCpf1 | 582 |
| NKG2A61 | TCTCCATTACAGGATAAAAGA | 21 | AsCpf1 | 583 |
| NKG2A62 | ATCCTGTAATGGAGAAAAATC | 21 | AsCpf1 | 584 |
| NKG2A63 | TCCTGTAATGGAGAAAAATCC | 21 | AsCpf1 | 585 |
| NKG2A136 | AAACATGAGTAAGTTGTTTTG | 21 | AsCpf1 | 586 |
| NKG2A137 | GCTTTCAAACATGAGTAAGTT | 21 | AsCpf1 | 587 |
| NKG2A138 | AAAGCCAAACCATTCATTGTC | 21 | AsCpf1 | 588 |
| NKG2A139 | GTAACAGCAGTCATCATCCAT | 21 | AsCpf1 | 589 |
| NKG2A140 | ACCATCCTCATGGATTGGTGT | 21 | AsCpf1 | 590 |
| NKG2A141 | TGTCCATCATTTCACCATCCT | 21 | AsCpf1 | 591 |
| NKG2A142 | GAAATTTCTGTCCATCATTTC | 21 | AsCpf1 | 592 |
| NKG2A143 | AGAAATTTCTGTCCATCATTT | 21 | AsCpf1 | 593 |
| NKG2A144 | TTTTAGAAATTTCTGTCCATC | 21 | AsCpf1 | 594 |
| NKG2A145 | CTTTTAGAAATTTCTGTCCAT | 21 | AsCpf1 | 595 |
| NKG2A146 | TTTTCTTTTAGAAATTTCTGT | 21 | AsCpf1 | 596 |
| NKG2A147 | TAAAAGAAAAGAAAGAATTTT | 21 | AsCpf1 | 597 |
| NKG2A270 | AAACATTTACATCTTACCATT | 21 | AsCpf1 | 598 |
| NKG2A271 | CATCTTACCATTTCTTCTTCA | 21 | AsCpf1 | 599 |
| NKG2A272 | TATAGATAATGAAGAAGAAAT | 21 | AsCpf1 | 600 |
| NKG2A273 | TTCTTCATTATCTATAGAAAG | 21 | AsCpf1 | 601 |
| NKG2A274 | CTGGCCTGTACTTCGAAGAAC | 21 | AsCpf1 | 602 |
| NKG2A275 | CTTACCAATGTAGTAACAACT | 21 | AsCpf1 | 603 |
| NKG2A276 | GCACGTCATTGTGGCCATTGT | 21 | AsCpf1 | 604 |
| NKG2A277 | TTTAGCACGTCATTGTGGCCA | 21 | AsCpf1 | 605 |
| NKG2A414 | CCATCAGCTCCAGAGAAGCTC | 21 | AsCpf1 | 606 |
| NKG2A415 | TCTCCCTGCAGATTTACCATC | 21 | AsCpf1 | 607 |
| NKG2A437 | AAATGCTTTACCTTTGCAGTG | 21 | AsCpf1 | 608 |
| NKG2A438 | AATGCTTTACCTTTGCAGTGA | 21 | AsCpf1 | 609 |
| NKG2A439 | CCTTTGCAGTGATAGGTTTTG | 21 | AsCpf1 | 610 |
| NKG2A440 | CAGTGATAGGTTTTGTCATTC | 21 | AsCpf1 | 611 |
| NKG2A441 | AAGGGAATGACAAAACCTATC | 21 | AsCpf1 | 612 |
| NKG2A442 | CAAGGGAATGACAAAACCTAT | 21 | AsCpf1 | 613 |
| NKG2A443 | GTCATTCCCTTGAAAATCCTG | 21 | AsCpf1 | 614 |
| NKG2A444 | TCATTCCCTTGAAAATCCTGA | 21 | AsCpf1 | 615 |
| NKG2A445 | TGAAGGTTTAATTCCGCATAG | 21 | AsCpf1 | 616 |
| NKG2A446 | GAAGGTTTAATTCCGCATAGG | 21 | AsCpf1 | 617 |
| NKG2A447 | AAGGTTTAATTCCGCATAGGT | 21 | AsCpf1 | 618 |
| NKG2A448 | ATTCCGCATAGGTTATTTCCT | 21 | AsCpf1 | 619 |
| NKG2A449 | GCAACTGAACAGGAAATAACC | 21 | AsCpf1 | 620 |
| NKG2A450 | AGCAACTGAACAGGAAATAAC | 21 | AsCpf1 | 621 |
| NKG2A451 | CTGTTCAGTTGCTAAAATGGA | 21 | AsCpf1 | 622 |
| NKG2A452 | TATTGCCTTTAGGTTTTCGTT | 21 | AsCpf1 | 623 |
| NKG2A453 | ATTGCCTTTAGGTTTTCGTTG | 21 | AsCpf1 | 624 |
| NKG2A454 | TTGCCTTTAGGTTTTCGTTGC | 21 | AsCpf1 | 625 |
| NKG2A455 | GGTTTTCGTTGCTGCCTCTTT | 21 | AsCpf1 | 626 |
| NKG2A456 | CGTTGCTGCCTCTTTGGGTTT | 21 | AsCpf1 | 627 |
| NKG2A457 | GTTGCTGCCTCTTTGGGTTTG | 21 | AsCpf1 | 628 |
| NKG2A458 | GGTTTGGGGGCAGATTCAGGT | 21 | AsCpf1 | 629 |
| NKG2A459 | GGGGCAGATTCAGGTCTGAGT | 21 | AsCpf1 | 630 |
| NKG2A460 | GCAACTGAACAGGAAATAACC | 21 | Cas12a | 1176 |

[0393] In some embodiments, the gRNA for use in the disclosure is a gRNA targeting TIGIT (TIGIT gRNA). In some embodiments, the gRNA targeting TIGIT is one or more of the gRNAs described in Table 11.

TABLE 11
Exemplary TIGIT gRNAs

| | gRNA Targeting Domain | | | SEQ ID |
|---|---|---|---|---|
| Name | Sequence (DNA) | Length | Enzyme | NO: |
| TIGIT4170 | TCTGCAGAAATGTTCCCCGT | 20 | AsCpf1 | 631 |
| TIGIT4171 | TGCAGAGAAAGGTGGCTCTA | 20 | AsCpf1 | 632 |
| TIGIT4172 | TAATGCTGACTTGGGGTGGC | 20 | AsCpf1 | 633 |
| TIGIT4173 | TAGGACCTCCAGGAAGATTC | 20 | AsCpf1 | 634 |
| TIGIT4174 | TAGTCAACGCGACCACCACG | 20 | AsCpf1 | 635 |
| TIGIT4175 | TCCTGAGGTCACCTTCCACA | 20 | AsCpf1 | 636 |
| TIGIT4176 | TATTGTGCCTGTCATCATTC | 20 | AsCpf1 | 637 |
| TIGIT4177 | TGACAGGCACAATAGAAACAA | 21 | SauCas9 | 638 |
| TIGIT4178 | GACAGGCACAATAGAAACAAC | 21 | SauCas9 | 639 |
| TIGIT4179 | AAACAACGGGGAACATTTCTG | 21 | SauCas9 | 640 |
| TIGIT4180 | ACAACGGGGAACATTTCTGCA | 21 | SauCas9 | 641 |
| TIGIT4181 | TGATAGAGCCACCTTTCTCTG | 21 | SauCas9 | 642 |
| TIGIT4182 | GGGTCACTTGTGCCGTGGTGG | 21 | SauCas9 | 643 |
| TIGIT4183 | GGCACAAGTGACCCAGGTCAA | 21 | SauCas9 | 644 |
| TIGIT4184 | GTCCTGCTGCTCCCAGTTGAC | 21 | SauCas9 | 645 |
| TIGIT4185 | TGGCCATTTGTAATGCTGACT | 21 | SauCas9 | 646 |
| TIGIT4186 | TGGCACATCTCCCCATCCTTC | 21 | SauCas9 | 647 |
| TIGIT4187 | CATCTCCCCATCCTTCAAGGA | 21 | SauCas9 | 648 |
| TIGIT4188 | CCACTCGATCCTTGAAGGATG | 21 | SauCas9 | 649 |
| TIGIT4189 | GGCCACTCGATCCTTGAAGGA | 21 | SauCas9 | 650 |
| TIGIT4190 | CCTGGGGCCACTCGATCCTTG | 21 | SauCas9 | 651 |
| TIGIT4191 | GACTGGAGGGTGAGGCCCAGG | 21 | SauCas9 | 652 |
| TIGIT4192 | ATCGTTCACGGTCAGCGACTG | 21 | SauCas9 | 653 |
| TIGIT4193 | GTCGCTGACCGTGAACGATAC | 21 | SauCas9 | 654 |
| TIGIT4194 | CGCTGACCGTGAACGATACAG | 21 | SauCas9 | 655 |
| TIGIT4195 | GCATCTATCACACCTACCCTG | 21 | SauCas9 | 656 |
| TIGIT4196 | CCTACCCTGATGGGACGTACA | 21 | SauCas9 | 657 |
| TIGIT4197 | TACCCTGATGGGACGTACACT | 21 | SauCas9 | 658 |
| TIGIT4198 | CCCTGATGGGACGTACACTGG | 21 | SauCas9 | 659 |
| TIGIT4199 | TTCTCCCAGTGTACGTCCCAT | 21 | SauCas9 | 660 |
| TIGIT4200 | GGAGAATCTTCCTGGAGGTCC | 21 | SauCas9 | 661 |
| TIGIT4201 | CATGGCTCCAAGCAATGGAAT | 21 | SauCas9 | 662 |
| TIGIT4202 | CGCGGCCATGGCTCCAAGCAA | 21 | SauCas9 | 663 |
| TIGIT4203 | TCGCGGCCATGGCTCCAAGCA | 21 | SauCas9 | 664 |
| TIGIT4204 | CATCGTGGTGGTCGCGTTGAC | 21 | SauCas9 | 665 |
| TIGIT4205 | AAAGCCCTCAGAATCCATTCT | 21 | SauCas9 | 666 |
| TIGIT4206 | CATTCTGTGGAAGGTGACCTC | 21 | SauCas9 | 667 |
| TIGIT4207 | TTCTGTGGAAGGTGACCTCAG | 21 | SauCas9 | 668 |
| TIGIT4208 | CCTGAGGTCACCTTCCACAGA | 21 | SauCas9 | 669 |
| TIGIT4209 | TTCTCCTGAGGTCACCTTCCA | 21 | SauCas9 | 670 |
| TIGIT4210 | AGGAGAAAATCAGCTGGACAG | 21 | SauCas9 | 671 |
| TIGIT4211 | GGAGAAAATCAGCTGGACAGG | 21 | SauCas9 | 672 |
| TIGIT4212 | GCCCCAGTGCTCCCTCACCCC | 21 | SauCas9 | 673 |
| TIGIT4213 | TGGACACAGCTTCCTGGGGGT | 21 | SauCas9 | 674 |
| TIGIT4214 | TCTGCCTGGACACAGCTTCCT | 21 | SauCas9 | 675 |
| TIGIT4215 | AGCTGCACCTGCTGGGCTCTG | 21 | SauCas9 | 676 |
| TIGIT4216 | GCTGGGCTCTGTGGAGAGCAG | 21 | SauCas9 | 677 |
| TIGIT4217 | TGGGCTCTGTGGAGAGCAGCG | 21 | SauCas9 | 678 |
| TIGIT4218 | CTGCATGACTACTTCAATGTC | 21 | SauCas9 | 679 |
| TIGIT4219 | AATGTCCTGAGTTACAGAAGC | 21 | SauCas9 | 680 |
| TIGIT4220 | TGGGTAACTGCAGCTTCTTCA | 21 | SauCas9 | 681 |
| TIGIT4221 | GACAGGCACAATAGAAACAA | 20 | SpyCas9 | 682 |
| TIGIT4222 | ACAGGCACAATAGAAACAAC | 20 | SpyCas9 | 683 |
| TIGIT4223 | CAGGCACAATAGAAACAACG | 20 | SpyCas9 | 684 |
| TIGIT4224 | GGGAACATTTCTGCAGAGAA | 20 | SpyCas9 | 685 |
| TIGIT4225 | AACATTTCTGCAGAGAAAGG | 20 | SpyCas9 | 686 |
| TIGIT4226 | ATGTCACCTCTCCTCCACCA | 20 | SpyCas9 | 687 |
| TIGIT4227 | CTTGTGCCGTGGTGGAGGAG | 20 | SpyCas9 | 688 |
| TIGIT4228 | GGTCACTTGTGCCGTGGTGG | 20 | SpyCas9 | 689 |
| TIGIT4229 | CACCACGGCACAAGTGACCC | 20 | SpyCas9 | 690 |
| TIGIT4230 | CTGGGTCACTTGTGCCGTGG | 20 | SpyCas9 | 691 |
| TIGIT4231 | GACCTGGGTCACTTGTGCCG | 20 | SpyCas9 | 692 |
| TIGIT4232 | CACAAGTGACCCAGGTCAAC | 20 | SpyCas9 | 693 |
| TIGIT4233 | ACAAGTGACCCAGGTCAACT | 20 | SpyCas9 | 694 |
| TIGIT4234 | CCAGGTCAACTGGGAGCAGC | 20 | SpyCas9 | 695 |
| TIGIT4235 | CTGCTGCTCCCAGTTGACCT | 20 | SpyCas9 | 696 |
| TIGIT4236 | CCTGCTGCTCCCAGTTGACC | 20 | SpyCas9 | 697 |
| TIGIT4237 | GGAGCAGCAGGACCAGCTTC | 20 | SpyCas9 | 698 |
| TIGIT4238 | CATTACAAATGGCCAGAAGC | 20 | SpyCas9 | 699 |
| TIGIT4239 | GGCCATTTGTAATGCTGACT | 20 | SpyCas9 | 700 |
| TIGIT4240 | GCCATTTGTAATGCTGACTT | 20 | SpyCas9 | 701 |
| TIGIT4241 | CCATTTGTAATGCTGACTTG | 20 | SpyCas9 | 702 |
| TIGIT4242 | TTTGTAATGCTGACTTGGGG | 20 | SpyCas9 | 703 |
| TIGIT4243 | CCCCAAGTCAGCATTACAAA | 20 | SpyCas9 | 704 |
| TIGIT4244 | GCACATCTCCCCATCCTTCA | 20 | SpyCas9 | 705 |
| TIGIT4245 | CCCATCCTTCAAGGATCGAG | 20 | SpyCas9 | 706 |
| TIGIT4246 | CACTCGATCCTTGAAGGATG | 20 | SpyCas9 | 707 |
| TIGIT4247 | CCACTCGATCCTTGAAGGAT | 20 | SpyCas9 | 708 |
| TIGIT4248 | GCCACTCGATCCTTGAAGGA | 20 | SpyCas9 | 709 |
| TIGIT4249 | TTCAAGGATCGAGTGGCCCC | 20 | SpyCas9 | 710 |
| TIGIT4250 | TGGGGCCACTCGATCCTTGA | 20 | SpyCas9 | 711 |
| TIGIT4251 | GATCGAGTGGCCCCAGGTCC | 20 | SpyCas9 | 712 |
| TIGIT4252 | AGTGGCCCCAGGTCCCGGCC | 20 | SpyCas9 | 713 |
| TIGIT4253 | GTGGCCCCAGGTCCCGGCCT | 20 | SpyCas9 | 714 |
| TIGIT4254 | GAGGCCCAGGCCGGGACCTG | 20 | SpyCas9 | 715 |
| TIGIT4255 | TGAGGCCCAGGCCGGGACCT | 20 | SpyCas9 | 716 |
| TIGIT4256 | GTGAGGCCCAGGCCGGGACC | 20 | SpyCas9 | 717 |
| TIGIT4257 | TGGAGGGTGAGGCCCAGGCC | 20 | SpyCas9 | 718 |
| TIGIT4258 | CTGGAGGGTGAGGCCCAGGC | 20 | SpyCas9 | 719 |
| TIGIT4259 | GCGACTGGAGGGTGAGGCCC | 20 | SpyCas9 | 720 |
| TIGIT4260 | CGGTCAGCGACTGGAGGGTG | 20 | SpyCas9 | 721 |
| TIGIT4261 | GTTCACGGTCAGCGACTGGA | 20 | SpyCas9 | 722 |
| TIGIT4262 | CGTTCACGGTCAGCGACTGG | 20 | SpyCas9 | 723 |
| TIGIT4263 | TATCGTTCACGGTCAGCGAC | 20 | SpyCas9 | 724 |
| TIGIT4264 | TCGCTGACCGTGAACGATAC | 20 | SpyCas9 | 725 |
| TIGIT4265 | CGCTGACCGTGAACGATACA | 20 | SpyCas9 | 726 |
| TIGIT4266 | GCTGACCGTGAACGATACAG | 20 | SpyCas9 | 727 |
| TIGIT4267 | GTACTCCCCTGTATCGTTCA | 20 | SpyCas9 | 728 |
| TIGIT4268 | ATCTATCACACCTACCCTGA | 20 | SpyCas9 | 729 |
| TIGIT4269 | TCTATCACACCTACCCTGAT | 20 | SpyCas9 | 730 |
| TIGIT4270 | TACCCTGATGGGACGTACAC | 20 | SpyCas9 | 731 |
| TIGIT4271 | ACCCTGATGGGACGTACACT | 20 | SpyCas9 | 732 |
| TIGIT4272 | AGTGTACGTCCCATCAGGGT | 20 | SpyCas9 | 733 |
| TIGIT4273 | TCCCAGTGTACGTCCCATCA | 20 | SpyCas9 | 734 |
| TIGIT4274 | CTCCCAGTGTACGTCCCATC | 20 | SpyCas9 | 735 |
| TIGIT4275 | GTACACTGGGAGAATCTTCC | 20 | SpyCas9 | 736 |
| TIGIT4276 | CACTGGGAGAATCTTCCTGG | 20 | SpyCas9 | 737 |
| TIGIT4277 | CTGAGCTTTCTAGGACCTCC | 20 | SpyCas9 | 738 |
| TIGIT4278 | AGGTTCCAGATTCCATTGCT | 20 | SpyCas9 | 739 |
| TIGIT4279 | AAGCAATGGAATCTGGAACC | 20 | SpyCas9 | 740 |
| TIGIT4280 | GATTCCATTGCTTGGAGCCA | 20 | SpyCas9 | 741 |
| TIGIT4281 | TGGCTCCAAGCAATGGAATC | 20 | SpyCas9 | 742 |
| TIGIT4282 | GCGGCCATGGCTCCAAGCAA | 20 | SpyCas9 | 743 |
| TIGIT4283 | TGGAGCCATGGCCGCGACGC | 20 | SpyCas9 | 744 |
| TIGIT4284 | AGCCATGGCCGCGACGCTGG | 20 | SpyCas9 | 745 |
| TIGIT4285 | GACCACCAGCGTCGCGGCCA | 20 | SpyCas9 | 746 |
| TIGIT4286 | GCAGATGACCACCAGCGTCG | 20 | SpyCas9 | 747 |
| TIGIT4287 | CATCTGCACAGCAGTCATCG | 20 | SpyCas9 | 748 |
| TIGIT4288 | CTGCACAGCAGTCATCGTGG | 20 | SpyCas9 | 749 |
| TIGIT4289 | AGCCCTCAGAATCCATTCTG | 20 | SpyCas9 | 750 |
| TIGIT4290 | CTCAGAATCCATTCTGTGGA | 20 | SpyCas9 | 751 |
| TIGIT4291 | TTCCACAGAATGGATTCTGA | 20 | SpyCas9 | 752 |
| TIGIT4292 | CTTCCACAGAATGGATTCTG | 20 | SpyCas9 | 753 |
| TIGIT4293 | ATTCTGTGGAAGGTGACCTC | 20 | SpyCas9 | 754 |
| TIGIT4294 | TGAGGTCACCTTCCACAGAA | 20 | SpyCas9 | 755 |
| TIGIT4295 | GACCTCAGGAGAAAATCAGC | 20 | SpyCas9 | 756 |
| TIGIT4296 | CAGGAGAAAATCAGCTGGAC | 20 | SpyCas9 | 757 |
| TIGIT4297 | GTCCAGCTGATTTTCTCCTG | 20 | SpyCas9 | 758 |
| TIGIT4298 | GAGAAAATCAGCTGGACAGG | 20 | SpyCas9 | 759 |
| TIGIT4299 | AATCAGCTGGACAGGAGGAA | 20 | SpyCas9 | 760 |
| TIGIT4300 | CCCAGTGCTCCCTCACCCCC | 20 | SpyCas9 | 761 |
| TIGIT4301 | CTGGGGGTGAGGGAGCACTG | 20 | SpyCas9 | 762 |
| TIGIT4302 | CCTGGGGGTGAGGGAGCACT | 20 | SpyCas9 | 763 |
| TIGIT4303 | TCCTGGGGGTGAGGGAGCAC | 20 | SpyCas9 | 764 |
| TIGIT4304 | ACACAGCTTCCTGGGGGTGA | 20 | SpyCas9 | 765 |
| TIGIT4305 | GACACAGCTTCCTGGGGGTG | 20 | SpyCas9 | 766 |
| TIGIT4306 | ACCCCCAGGAAGCTGTGTCC | 20 | SpyCas9 | 767 |
| TIGIT4307 | GCCTGGACACAGCTTCCTGG | 20 | SpyCas9 | 768 |
| TIGIT4308 | TGCCTGGACACAGCTTCCTG | 20 | SpyCas9 | 769 |
| TIGIT4309 | CTGCCTGGACACAGCTTCCT | 20 | SpyCas9 | 770 |
| TIGIT4310 | TCTGCCTGGACACAGCTTCC | 20 | SpyCas9 | 771 |
| TIGIT4311 | CAGGCAGAAGCTGCACCTGC | 20 | SpyCas9 | 772 |
| TIGIT4312 | AGGCAGAAGCTGCACCTGCT | 20 | SpyCas9 | 773 |
| TIGIT4313 | CAGCAGGTGCAGCTTCTGCC | 20 | SpyCas9 | 774 |
| TIGIT4314 | GCTGCACCTGCTGGGCTCTG | 20 | SpyCas9 | 775 |
| TIGIT4315 | TGCTCTCCACAGAGCCCAGC | 20 | SpyCas9 | 776 |
| TIGIT4316 | CTGGGCTCTGTGGAGAGCAG | 20 | SpyCas9 | 777 |
| TIGIT4317 | TGGGCTCTGTGGAGAGCAGC | 20 | SpyCas9 | 778 |
| TIGIT4318 | GGGCTCTGTGGAGAGCAGCG | 20 | SpyCas9 | 779 |
| TIGIT4319 | CTGTGGAGAGCAGCGGGGAG | 20 | SpyCas9 | 780 |
| TIGIT4320 | ATTGAAGTAGTCATGCAGCT | 20 | SpyCas9 | 781 |
| TIGIT4321 | TGTCCTGAGTTACAGAAGCC | 20 | SpyCas9 | 782 |
| TIGIT4322 | GTCCTGAGTTACAGAAGCCT | 20 | SpyCas9 | 783 |
| TIGIT4323 | TACCCAGGCTTCTGTAACTC | 20 | SpyCas9 | 784 |
| TIGIT4324 | TGAAGAAGCTGCAGTTACCC | 20 | SpyCas9 | 785 |
| TIGIT4325 | TGCAGCTTCTTCACAGAGAC | 20 | SpyCas9 | 786 |
| TIGIT5053 | GTTGTTTCTATTGTGCCTGT | 20 | AsCpf1 RR | 787 |
| TIGIT5054 | CGTTGTTTCTATTGTGCCTG | 20 | AsCpf1 RR | 788 |
| TIGIT5055 | CCGTTGTTTCTATTGTGCCT | 20 | AsCpf1 RR | 789 |
| TIGIT5056 | CCACGGCACAAGTGACCCAG | 20 | AsCpf1 RR | 790 |
| TIGIT5057 | AGTTGACCTGGGTCACTTGT | 20 | AsCpf1 RR | 791 |
| TIGIT5058 | AAGTCAGCATTACAAATGGC | 20 | AsCpf1 RR | 792 |
| TIGIT5059 | CATCCTTCAAGGATCGAGTG | 20 | AsCpf1 RR | 793 |
| TIGIT5060 | ATCCTTCAAGGATCGAGTGG | 20 | AsCpf1 RR | 794 |
| TIGIT5061 | AGGATCGAGTGGCCCCAGGT | 20 | AsCpf1 RR | 795 |
| TIGIT5062 | AGGTCCCGGCCTGGGCCTCA | 20 | AsCpf1 RR | 796 |
| TIGIT5063 | GGCCTGGGCCTCACCCTCCA | 20 | AsCpf1 RR | 797 |
| TIGIT5064 | CGGTCAGCGACTGGAGGGTG | 20 | AsCpf1 RR | 798 |
| TIGIT5065 | GTCGCTGACCGTGAACGATA | 20 | AsCpf1 RR | 799 |
| TIGIT5066 | TGTATCGTTCACGGTCAGCG | 20 | AsCpf1 RR | 800 |
| TIGIT5067 | CTGTATCGTTCACGGTCAGC | 20 | AsCpf1 RR | 801 |
| TIGIT5068 | ATCAGGGTAGGTGTGATAGA | 20 | AsCpf1 RR | 802 |
| TIGIT5069 | AGTGTACGTCCCATCAGGGT | 20 | AsCpf1 RR | 803 |
| TIGIT5070 | GGAAGATTCTCCCAGTGTAC | 20 | AsCpf1 RR | 804 |
| TIGIT5071 | TGGAGGTCCTAGAAAGCTCA | 20 | AsCpf1 RR | 805 |
| TIGIT5072 | AGCAATGGAATCTGGAACCT | 20 | AsCpf1 RR | 806 |
| TIGIT5073 | AGATTCCATTGCTTGGAGCC | 20 | AsCpf1 RR | 807 |
| TIGIT5074 | GATTCCATTGCTTGGAGCCA | 20 | AsCpf1 RR | 808 |
| TIGIT5075 | ATTGCTTGGAGCCATGGCCG | 20 | AsCpf1 RR | 809 |
| TIGIT5076 | TTGCTTGGAGCCATGGCCGC | 20 | AsCpf1 RR | 810 |
| TIGIT5077 | CAGAATGGATTCTGAGGGCT | 20 | AsCpf1 RR | 811 |
| TIGIT5078 | ACAGAATGGATTCTGAGGGC | 20 | AsCpf1 RR | 812 |
| TIGIT5079 | TTCTGTGGAAGGTGACCTCA | 20 | AsCpf1 RR | 813 |
| TIGIT5080 | GCTGATTTTCTCCTGAGGTC | 20 | AsCpf1 RR | 814 |
| TIGIT5081 | TCCTGTCCAGCTGATTTTCT | 20 | AsCpf1 RR | 815 |
| TIGIT5082 | TTCCTCCTGTCCAGCTGATT | 20 | AsCpf1 RR | 816 |
| TIGIT5083 | TGGGGGTGAGGGAGCACTGG | 20 | AsCpf1 RR | 817 |
| TIGIT5084 | AGTGCTCCCTCACCCCCAGG | 20 | AsCpf1 RR | 818 |
| TIGIT5085 | TCACCCCCAGGAAGCTGTGT | 20 | AsCpf1 RR | 819 |
| TIGIT5086 | CAGGAAGCTGTGTCCAGGCA | 20 | AsCpf1 RR | 820 |
| TIGIT5087 | AGGAAGCTGTGTCCAGGCAG | 20 | AsCpf1 RR | 821 |
| TIGIT5088 | GGCAGAAGCTGCACCTGCTG | 20 | AsCpf1 RR | 822 |
| TIGIT5089 | CAGAGCCCAGCAGGTGCAGC | 20 | AsCpf1 RR | 823 |
| TIGIT5090 | GCTGCTCTCCACAGAGCCCA | 20 | AsCpf1 RR | 824 |
| TIGIT5091 | CGCTGCTCTCCACAGAGCCC | 20 | AsCpf1 RR | 825 |
| TIGIT5092 | ATGTCCTGAGTTACAGAAGC | 20 | AsCpf1 RR | 826 |
| TIGIT5093 | TGCAGAGAAAGGTGGCTCTAT | 21 | Cas12a | 1175 |

[0394] In some embodiments the gRNA for use in the disclosure is a gRNA targeting ADORA2a (ADORA2a gRNA). In some embodiments, the gRNA targeting ADORA2a is one or more of the gRNAs described in Table 12.

TABLE 12
Exemplary ADORA2a gRNAs

| | gRNA Targeting | | | |
|---|---|---|---|---|
| | Domain Sequence | | | SEQ ID |
| Name | (DNA) | Length | Enzyme | NO: |
| ADORA2A337 | GAGCACACCCACTGCGATGT | 20 | SpyCas9 | 827 |
| ADORA2A338 | GATGGCCAGGAGACTGAAGA | 20 | SpyCas9 | 828 |
| ADORA2A339 | CTGCTCACCGGAGCGGGATG | 20 | SpyCas9 | 829 |
| ADORA2A340 | GTCTGTGGCCATGCCCATCA | 20 | SpyCas9 | 830 |
| ADORA2A341 | TCACCGGAGCGGGATGCGGA | 20 | SpyCas9 | 831 |
| ADORA2A342 | GTGGCAGGCAGCGCAGAACC | 20 | SpyCas9 | 832 |
| ADORA2A343 | AGCACACCAGCACATTGCCC | 20 | SpyCas9 | 833 |
| ADORA2A344 | CAGGTTGCTGTTGAGCCACA | 20 | SpyCas9 | 834 |
| ADORA2A345 | CTTCATTGCCTGCTTCGTCC | 20 | SpyCas9 | 835 |
| ADORA2A346 | GTACACCGAGGAGCCCATGA | 20 | SpyCas9 | 836 |
| ADORA2A347 | GATGGCAATGTAGCGGTCAA | 20 | SpyCas9 | 837 |
| ADORA2A348 | CTCCTCGGTGTACATCACGG | 20 | SpyCas9 | 838 |
| ADORA2A349 | CGAGGAGCCCATGATGGGCA | 20 | SpyCas9 | 839 |
| ADORA2A350 | GGGCTCCTCGGTGTACATCA | 20 | SpyCas9 | 840 |
| ADORA2A351 | CTTTGTGGTGTCACTGGCGG | 20 | SpyCas9 | 841 |
| ADORA2A352 | CCGCTCCGGTGAGCAGGGCC | 20 | SpyCas9 | 842 |
| ADORA2A353 | GGGTTCTGCGCTGCCTGCCA | 20 | SpyCas9 | 843 |
| ADORA2A354 | GGACGAAGCAGGCAATGAAG | 20 | SpyCas9 | 844 |
| ADORA2A355 | GTGCTGATGGTGATGGCAAA | 20 | SpyCas9 | 845 |
| ADORA2A356 | AGCGCAGAACCCGGTGCTGA | 20 | SpyCas9 | 846 |
| ADORA2A357 | GAGCTCCATCTTCAGTCTCC | 20 | SpyCas9 | 847 |
| ADORA2A358 | TGCTGATGGTGATGGCAAAG | 20 | SpyCas9 | 848 |
| ADORA2A359 | GGCGGCGGCCGACATCGCAG | 20 | SpyCas9 | 849 |
| ADORA2A360 | AATGAAGAGGCAGCCGTGGC | 20 | SpyCas9 | 850 |
| ADORA2A361 | GGGCAATGTGCTGGTGTGCT | 20 | SpyCas9 | 851 |
| ADORA2A362 | CATGCCCATCATGGGCTCCT | 20 | SpyCas9 | 852 |
| ADORA2A363 | AATGTAGCGGTCAATGGCGA | 20 | SpyCas9 | 853 |
| ADORA2A364 | AGTAGTTGGTGACGTTCTGC | 20 | SpyCas9 | 854 |
| ADORA2A365 | AGCGGTCAATGGCGATGGCC | 20 | SpyCas9 | 855 |
| ADORA2A366 | CGCATCCCGCTCCGGTGAGC | 20 | SpyCas9 | 856 |
| ADORA2A367 | GCATCCCGCTCCGGTGAGCA | 20 | SpyCas9 | 857 |
| ADORA2A368 | TGGGCAATGTGCTGGTGTGC | 20 | SpyCas9 | 858 |
| ADORA2A369 | CAACTACTTTGTGGTGTCAC | 20 | SpyCas9 | 859 |
| ADORA2A370 | CGCTCCGGTGAGCAGGGCCG | 20 | SpyCas9 | 860 |
| ADORA2A371 | GATGGTGATGGCAAAGGGGA | 20 | SpyCas9 | 861 |
| ADORA2A372 | GGTGTACATCACGGTGGAGC | 20 | SpyCas9 | 862 |
| ADORA2A373 | GAACGTCACCAACTACTTTG | 20 | SpyCas9 | 863 |
| ADORA2A374 | CAGTGACACCACAAAGTAGT | 20 | SpyCas9 | 864 |
| ADORA2A375 | GGCCATCCTGGGCAATGTGC | 20 | SpyCas9 | 865 |
| ADORA2A376 | CCCGGCCCTGCTCACCGGAG | 20 | SpyCas9 | 866 |
| ADORA2A377 | CACCAGCACATTGCCCAGGA | 20 | SpyCas9 | 867 |
| ADORA2A378 | TTTGCCATCACCATCAGCAC | 20 | SpyCas9 | 868 |
| ADORA2A379 | CTCCACCGTGATGTACACCG | 20 | SpyCas9 | 869 |
| ADORA2A380 | GGAGCTGGCCATTGCTGTGC | 20 | SpyCas9 | 870 |
| ADORA2A381 | CAGGATGGCCAGCACAGCAA | 20 | SpyCas9 | 871 |
| ADORA2A382 | GAACCCGGTGCTGATGGTGA | 20 | SpyCas9 | 872 |
| ADORA2A383 | TGGAGCTCTGCGTGAGGACC | 20 | SpyCas9 | 873 |
| ADORA2A384 | CCCGCTCCGGTGAGCAGGGC | 20 | SpyCas9 | 874 |
| ADORA2A385 | AGGCAATGAAGAGGCAGCCG | 20 | SpyCas9 | 875 |
| ADORA2A386 | CCGGCCCTGCTCACCGGAGC | 20 | SpyCas9 | 876 |
| ADORA2A387 | GCGGCGGCCGACATCGCAGT | 20 | SpyCas9 | 877 |
| ADORA2A388 | GGTGCTGATGGTGATGGCAA | 20 | SpyCas9 | 878 |
| ADORA2A389 | CTACTTTGTGGTGTCACTGG | 20 | SpyCas9 | 879 |
| ADORA2A390 | TACACCGAGGAGCCCATGAT | 20 | SpyCas9 | 880 |
| ADORA2A391 | TCTGTGGCCATGCCCATCAT | 20 | SpyCas9 | 881 |
| ADORA2A392 | ATTGCTGTGCTGGCCATCCT | 20 | SpyCas9 | 882 |
| ADORA2A393 | CGTGAGGACCAGGACGAAGC | 20 | SpyCas9 | 883 |
| ADORA2A394 | TTGCCATCACCATCAGCACC | 20 | SpyCas9 | 884 |
| ADORA2A395 | GGATGCGGATGGCAATGTAG | 20 | SpyCas9 | 885 |
| ADORA2A396 | TTGCCATCCGCATCCCGCTC | 20 | SpyCas9 | 886 |
| ADORA2A397 | TGAAGATGGAGCTCTGCGTG | 20 | SpyCas9 | 887 |
| ADORA2A398 | CATTGCTGTGCTGGCCATCC | 20 | SpyCas9 | 888 |
| ADORA2A399 | TGCTGGTGTGCTGGGCCGTG | 20 | SpyCas9 | 889 |
| ADORA2A820 | GGCTCCTCGGTGTACATCACG | 21 | SauCas9 | 890 |
| ADORA2A821 | GAGCTCTGCGTGAGGACCAGG | 21 | SauCas9 | 891 |
| ADORA2A822 | GATGGAGCTCTGCGTGAGGAC | 21 | SauCas9 | 892 |
| ADORA2A823 | CCAGCACACCAGCACATTGCC | 21 | SauCas9 | 893 |
| ADORA2A824 | AGGACCAGGACGAAGCAGGCA | 21 | SauCas9 | 894 |
| ADORA2A825 | TGCCATCCGCATCCCGCTCCG | 21 | SauCas9 | 895 |
| ADORA2A826 | GTGTGGCTCAACAGCAACCTG | 21 | SauCas9 | 896 |
| ADORA2A827 | AGCTCCACCGTGATGTACACC | 21 | SauCas9 | 897 |
| ADORA2A828 | GTAGCGGTCAATGGCGATGGC | 21 | SauCas9 | 898 |
| ADORA2A829 | CGGTGCTGATGGTGATGGCAA | 21 | SauCas9 | 899 |
| ADORA2A830 | CCCTGCTCACCGGAGCGGGAT | 21 | SauCas9 | 900 |
| ADORA2A831 | GTGACGTTCTGCAGGTTGCTG | 21 | SauCas9 | 901 |
| ADORA2A832 | GCTCCACCGTGATGTACACCG | 21 | SauCas9 | 902 |
| ADORA2A833 | ACTGAAGATGGAGCTCTGCGT | 21 | SauCas9 | 903 |
| ADORA2A834 | CCAGCTCCACCGTGATGTACA | 21 | SauCas9 | 904 |
| ADORA2A835 | CCTTTGCCATCACCATCAGCA | 21 | SauCas9 | 905 |
| ADORA2A836 | CCGGTGCTGATGGTGATGGCA | 21 | SauCas9 | 906 |
| ADORA2A837 | CCTGGGCAATGTGCTGGTGTG | 21 | SauCas9 | 907 |
| ADORA2A838 | AGGCAGCCGTGGCAGGCAGCG | 21 | SauCas9 | 908 |
| ADORA2A839 | GCGATGGCCAGGAGACTGAAG | 21 | SauCas9 | 909 |
| ADORA2A840 | CGATGGCCAGGAGACTGAAGA | 21 | SauCas9 | 910 |
| ADORA2A841 | TCCCGCTCCGGTGAGCAGGGC | 21 | SauCas9 | 911 |
| ADORA2A842 | TGCTTCGTCCTGGTCCTCACG | 21 | SauCas9 | 912 |
| ADORA2A843 | ACCAGGACGAAGCAGGCAATG | 21 | SauCas9 | 913 |
| ADORA2A844 | ATGTACACCGAGGAGCCCATG | 21 | SauCas9 | 914 |
| ADORA2A845 | TCGTCTGTGGCCATGCCCATC | 21 | SauCas9 | 915 |
| ADORA2A846 | TCAATGGCGATGGCCAGGAGA | 21 | SauCas9 | 916 |
| ADORA2A847 | GGTGCTGATGGTGATGGCAAA | 21 | SauCas9 | 917 |
| ADORA2A848 | TAGCGGTCAATGGCGATGGCC | 21 | SauCas9 | 918 |
| ADORA2A849 | TCCGCATCCCGCTCCGGTGAG | 21 | SauCas9 | 919 |
| ADORA2A850 | CTGGCGGCGGCCGACATCGCA | 21 | SauCas9 | 920 |
| ADORA2A851 | GCCATTGCTGTGCTGGCCATC | 21 | SauCas9 | 921 |
| ADORA2A852 | ATCCCGCTCCGGTGAGCAGGG | 21 | SauCas9 | 922 |
| ADORA2A853 | AGACTGAAGATGGAGCTCTGC | 21 | SauCas9 | 923 |
| ADORA2A854 | CCCCGGCCCTGCTCACCGGAG | 21 | SauCas9 | 924 |
| ADORA2A855 | ATGGTGATGGCAAAGGGGATG | 21 | SauCas9 | 925 |
| ADORA2A856 | GCTCCTCGGTGTACATCACGG | 21 | SauCas9 | 926 |
| ADORA2A248 | TGTCGATGGCAATAGCCAAG | 20 | SpyCas9 | 927 |
| ADORA2A249 | AGAAGTTGGTGACGTTCTGC | 20 | SpyCas9 | 928 |
| ADORA2A250 | TTCGCCATCACCATCAGCAC | 20 | SpyCas9 | 929 |
| ADORA2A251 | GAAGAAGAGGCAGCCATGGC | 20 | SpyCas9 | 930 |
| ADORA2A252 | CACAAGCACGTTACCCAGGA | 20 | SpyCas9 | 931 |
| ADORA2A253 | CAACTTCTTCGTGGTATCTC | 20 | SpyCas9 | 932 |
| ADORA2A254 | CAGGATGGCCAGCACAGCAA | 20 | SpyCas9 | 933 |
| ADORA2A255 | AATTCCACTCCGGTGAGCCA | 20 | SpyCas9 | 934 |
| ADORA2A256 | AGCGCAGAAGCCAGTGCTGA | 20 | SpyCas9 | 935 |
| ADORA2A257 | GTGCTGATGGTGATGGCGAA | 20 | SpyCas9 | 936 |
| ADORA2A258 | GGAGCTGGCCATTGCTGTGC | 20 | SpyCas9 | 937 |
| ADORA2A259 | AATAGCCAAGAGGCTGAAGA | 20 | SpyCas9 | 938 |
| ADORA2A260 | CTCCTCGGTGTACATCATGG | 20 | SpyCas9 | 939 |
| ADORA2A261 | GGACAAAGCAGGCGAAGAAG | 20 | SpyCas9 | 940 |
| ADORA2A262 | TCTGGCGGCGGCTGACATCG | 20 | SpyCas9 | 941 |
| ADORA2A263 | TGGGTAACGTGCTTGTGTGC | 20 | SpyCas9 | 942 |
| ADORA2A264 | GATGTACACCGAGGAGCCCA | 20 | SpyCas9 | 943 |
| ADORA2A265 | TAACCCCTGGCTCACCGGAG | 20 | SpyCas9 | 944 |
| ADORA2A266 | TCACCGGAGTGGAATTCGGA | 20 | SpyCas9 | 945 |
| ADORA2A267 | GCGGCGGCTGACATCGCGGT | 20 | SpyCas9 | 946 |
| ADORA2A268 | GATGGTGATGGCGAATGGGA | 20 | SpyCas9 | 947 |
| ADORA2A269 | GGCTTCTGCGCTGCCTGCCA | 20 | SpyCas9 | 948 |
| ADORA2A270 | ATTCCACTCCGGTGAGCCAG | 20 | SpyCas9 | 949 |
| ADORA2A271 | GGTGTACATCATGGTGGAGC | 20 | SpyCas9 | 950 |
| ADORA2A272 | ATTGCTGTGCTGGCCATCCT | 20 | SpyCas9 | 951 |
| ADORA2A273 | CTCCACCATGATGTACACCG | 20 | SpyCas9 | 952 |
| ADORA2A274 | GGCGGCGGCTGACATCGCGG | 20 | SpyCas9 | 953 |
| ADORA2A275 | TACACCGAGGAGCCCATGGC | 20 | SpyCas9 | 954 |
| ADORA2A276 | GGGTAACGTGCTTGTGTGCT | 20 | SpyCas9 | 955 |
| ADORA2A277 | CAGGTTGCTGTTGATCCACA | 20 | SpyCas9 | 956 |
| ADORA2A278 | TGAAGATGGAACTCTGCGTG | 20 | SpyCas9 | 957 |
| ADORA2A279 | GATGGCGATGTATCTGTCGA | 20 | SpyCas9 | 958 |
| ADORA2A280 | CTTCTTCGCCTGCTTTGTCC | 20 | SpyCas9 | 959 |
| ADORA2A281 | AGGCGAAGAAGAGGCAGCCA | 20 | SpyCas9 | 960 |
| ADORA2A282 | TGCTTGTGTGCTGGGCCGTG | 20 | SpyCas9 | 961 |
| ADORA2A283 | GAAGCCAGTGCTGATGGTGA | 20 | SpyCas9 | 962 |
| ADORA2A284 | CGTGAGGACCAGGACAAAGC | 20 | SpyCas9 | 963 |
| ADORA2A285 | TGGAACTCTGCGTGAGGACC | 20 | SpyCas9 | 964 |
| ADORA2A286 | CATTGCTGTGCTGGCCATCC | 20 | SpyCas9 | 965 |
| ADORA2A287 | TTCTCCCGCCATGGGCTCCT | 20 | SpyCas9 | 966 |
| ADORA2A288 | TGGCTCACCGGAGTGGAATT | 20 | SpyCas9 | 967 |
| ADORA2A289 | TGCTGATGGTGATGGCGAAT | 20 | SpyCas9 | 968 |
| ADORA2A290 | CTTCGTGGTATCTCTGGCGG | 20 | SpyCas9 | 969 |
| ADORA2A291 | AGCACACAAGCACGTTACCC | 20 | SpyCas9 | 970 |
| ADORA2A292 | GGGCTCCTCGGTGTACATCA | 20 | SpyCas9 | 971 |
| ADORA2A293 | GTACACCGAGGAGCCCATGG | 20 | SpyCas9 | 972 |
| ADORA2A294 | GAACGTCACCAACTTCTTCG | 20 | SpyCas9 | 973 |
| ADORA2A295 | TCGCCATCCGAATTCCACTC | 20 | SpyCas9 | 974 |
| ADORA2A296 | GAGTTCCATCTTCAGCCTCT | 20 | SpyCas9 | 975 |
| ADORA2A297 | GAATTCCACTCCGGTGAGCC | 20 | SpyCas9 | 976 |
| ADORA2A298 | CAGAGATACCACGAAGAAGT | 20 | SpyCas9 | 977 |
| ADORA2A299 | CTTCTTCGTGGTATCTCTGG | 20 | SpyCas9 | 978 |
| ADORA2A695 | CAGTGCTGATGGTGATGGCGA | 21 | SauCas9 | 979 |
| ADORA2A696 | CGAATTCCACTCCGGTGAGCC | 21 | SauCas9 | 980 |
| ADORA2A697 | CCGAATTCCACTCCGGTGAGC | 21 | SauCas9 | 981 |
| ADORA2A698 | GCTGAAGATGGAACTCTGCGT | 21 | SauCas9 | 982 |
| ADORA2A699 | CGTGCTTGTGTGCTGGGCCGT | 21 | SauCas9 | 983 |
| ADORA2A700 | GTGAGGACCAGGACAAAGCAG | 21 | SauCas9 | 984 |
| ADORA2A701 | TCGATGGCAATAGCCAAGAGG | 21 | SauCas9 | 985 |
| ADORA2A702 | CATCGACAGATACATCGCCAT | 21 | SauCas9 | 986 |
| ADORA2A703 | GTACACCGAGGAGCCCATGGC | 21 | SauCas9 | 987 |
| ADORA2A704 | GCTCCACCATGATGTACACCG | 21 | SauCas9 | 988 |
| ADORA2A705 | AAGCCAGTGCTGATGGTGATG | 21 | SauCas9 | 989 |
| ADORA2A706 | CACCGCGATGTCAGCCGCCGC | 21 | SauCas9 | 990 |
| ADORA2A707 | AGGCTGAAGATGGAACTCTGC | 21 | SauCas9 | 991 |
| ADORA2A708 | GCCGCCGCCAGAGATACCACG | 21 | SauCas9 | 992 |
| ADORA2A709 | AGCTCCACCATGATGTACACC | 21 | SauCas9 | 993 |
| ADORA2A710 | AGGCAGCCATGGCAGGCAGCG | 21 | SauCas9 | 994 |
| ADORA2A711 | CCTGGCTCACCGGAGTGGAAT | 21 | SauCas9 | 995 |
| ADORA2A712 | CCAGCTCCACCATGATGTACA | 21 | SauCas9 | 996 |
| ADORA2A713 | ACCAGGACAAAGCAGGCGAAG | 21 | SauCas9 | 997 |
| ADORA2A714 | CCTGGGTAACGTGCTTGTGTG | 21 | SauCas9 | 998 |
| ADORA2A715 | AGGACCAGGACAAAGCAGGCG | 21 | SauCas9 | 999 |
| ADORA2A716 | TCAGCCGCCGCCAGAGATACC | 21 | SauCas9 | 1000 |
| ADORA2A717 | GGCTCCTCGGTGTACATCATG | 21 | SauCas9 | 1001 |
| ADORA2A718 | CTGGCGGCGGCTGACATCGCG | 21 | SauCas9 | 1002 |
| ADORA2A719 | GATGGAACTCTGCGTGAGGAC | 21 | SauCas9 | 1003 |
| ADORA2A720 | GCTCCTCGGTGTACATCATGG | 21 | SauCas9 | 1004 |
| ADORA2A721 | TGTACACCGAGGAGCCCATGG | 21 | SauCas9 | 1005 |
| ADORA2A722 | GCCATTGCTGTGCTGGCCATC | 21 | SauCas9 | 1006 |
| ADORA2A723 | CAATAGCCAAGAGGCTGAAGA | 21 | SauCas9 | 1007 |
| ADORA2A724 | ATGGTGATGGCGAATGGGATG | 21 | SauCas9 | 1008 |
| ADORA2A725 | ATGTACACCGAGGAGCCCATG | 21 | SauCas9 | 1009 |
| ADORA2A726 | GTGTGGATCAACAGCAACCTG | 21 | SauCas9 | 1010 |
| ADORA2A727 | TGCTTTGTCCTGGTCCTCACG | 21 | SauCas9 | 1011 |
| ADORA2A728 | GTAACCCCTGGCTCACCGGAG | 21 | SauCas9 | 1012 |
| ADORA2A729 | CCAGCACACAAGCACGTTACC | 21 | SauCas9 | 1013 |
| ADORA2A730 | TATCTGTCGATGGCAATAGCC | 21 | SauCas9 | 1014 |
| ADORA2A731 | GCAATAGCCAAGAGGCTGAAG | 21 | SauCas9 | 1015 |
| ADORA2A732 | AGTGCTGATGGTGATGGCGAA | 21 | SauCas9 | 1016 |
| ADORA2A733 | ACACCGAGGAGCCCATGGCGG | 21 | SauCas9 | 1017 |
| ADORA2A734 | CGCCATCCGAATTCCACTCCG | 21 | SauCas9 | 1018 |
| ADORA2A4111 | TGGTGTCACTGGCGGCGGCC | 20 | AsCpf1 | 1019 |
| ADORA2A4112 | CCATCACCATCAGCACCGGG | 20 | AsCpf1 | 1020 |
| ADORA2A4113 | CCATCGGCCTGACTCCCATG | 20 | AsCpf1 | 1021 |
| ADORA2A4114 | GCTGACCGCAGTTGTTCCAA | 20 | AsCpf1 | 1022 |
| ADORA2A4115 | AGGATGTGGTCCCCATGAAC | 20 | AsCpf1 | 1023 |
| ADORA2A4116 | CCTGTGTGCTGGTGCCCCTG | 20 | AsCpf1 | 1024 |
| ADORA2A4117 | CGGATCTTCCTGGCGGCGCG | 20 | AsCpf1 | 1025 |
| ADORA2A4118 | CCCTCTGCTGGCTGCCCCTA | 20 | AsCpf1 | 1026 |
| ADORA2A4119 | TTCTGCCCCGACTGCAGCCA | 20 | AsCpf1 | 1027 |
| ADORA2A4120 | AAGGCAGCTGGCACCAGTGC | 20 | AsCpf1 | 1028 |
| ADORA2A4121 | TAAGGGCATCATTGCCATCTG | 21 | SauCas9 | 1029 |
| ADORA2A4122 | CGGCCTGACTCCCATGCTAGG | 21 | SauCas9 | 1030 |
| ADORA2A4123 | GCAGTTGTTCCAACCTAGCAT | 21 | SauCas9 | 1031 |
| ADORA2A4124 | CCGCAGTTGTTCCAACCTAGC | 21 | SauCas9 | 1032 |
| ADORA2A4125 | CAAGAACCACTCCCAGGGCTG | 21 | SauCas9 | 1033 |
| ADORA2A4126 | CTTGGCCCTCCCCGCAGCCCT | 21 | SauCas9 | 1034 |
| ADORA2A4127 | CACTTGGCCCTCCCCGCAGCC | 21 | SauCas9 | 1035 |
| ADORA2A4128 | GGCCAAGTGGCCTGTCTCTTT | 21 | SauCas9 | 1036 |
| ADORA2A4129 | TTCATGGGGACCACATCCTCA | 21 | SauCas9 | 1037 |
| ADORA2A4130 | TGAAGTACACCATGTAGTTCA | 21 | SauCas9 | 1038 |
| ADORA2A4131 | CTGGTGCCCCTGCTGCTCATG | 21 | SauCas9 | 1039 |
| ADORA2A4132 | GCTCATGCTGGGTGTCTATTT | 21 | SauCas9 | 1040 |
| ADORA2A4133 | CTTCAGCTGTCGTCGCGCCGC | 21 | SauCas9 | 1041 |
| ADORA2A4134 | CGCGACGACAGCTGAAGCAGA | 21 | SauCas9 | 1042 |
| ADORA2A4135 | GATGGAGAGCCAGCCTCTGCC | 21 | SauCas9 | 1043 |
| ADORA2A4136 | GCGTGGCTGCAGTCGGGGCAG | 21 | SauCas9 | 1044 |
| ADORA2A4137 | ACGATGGCCAGGTACATGAGC | 21 | SauCas9 | 1045 |
| ADORA2A4138 | CTCTCCCACACCAATTCGGTT | 21 | SauCas9 | 1046 |
| ADORA2A4139 | GATTCACAACCGAATTGGTGT | 21 | SauCas9 | 1047 |
| ADORA2A4140 | GGGATTCACAACCGAATTGGT | 21 | SauCas9 | 1048 |
| ADORA2A4141 | CGTAGATGAAGGGATTCACAA | 21 | SauCas9 | 1049 |
| ADORA2A4142 | GGATACGGTAGGCGTAGATGA | 21 | SauCas9 | 1050 |
| ADORA2A4143 | TCATCTACGCCTACCGTATCC | 21 | SauCas9 | 1051 |
| ADORA2A4144 | CGGATACGGTAGGCGTAGATG | 21 | SauCas9 | 1052 |
| ADORA2A4145 | GCGGAAGGTCTGGCGGAACTC | 21 | SauCas9 | 1053 |
| ADORA2A4146 | AATGATCTTGCGGAAGGTCTG | 21 | SauCas9 | 1054 |
| ADORA2A4147 | GACGTGGCTGCGAATGATCTT | 21 | SauCas9 | 1055 |
| ADORA2A4148 | TTGCTGCCTCAGGACGTGGCT | 21 | SauCas9 | 1056 |
| ADORA2A4149 | CAAGGCAGCTGGCACCAGTGC | 21 | SauCas9 | 1057 |
| ADORA2A4150 | CGGGCACTGGTGCCAGCTGCC | 21 | SauCas9 | 1058 |
| ADORA2A4151 | CTTGGCAGCTCATGGCAGTGA | 21 | SauCas9 | 1059 |
| ADORA2A4152 | CCGTCTCAACGGCCACCCGCC | 21 | SauCas9 | 1060 |
| ADORA2A4153 | CACACTCCTGGCGGGTGGCCG | 21 | SauCas9 | 1061 |
| ADORA2A4154 | TGCCGTTGGCCCACACTCCTG | 21 | SauCas9 | 1062 |
| ADORA2A4155 | CCATTGGGCCTCCGCTCAGGG | 21 | SauCas9 | 1063 |
| ADORA2A4156 | CATAGCCATTGGGCCTCCGCT | 21 | SauCas9 | 1064 |
| ADORA2A4157 | AATGGCTATGCCCTGGGGCTG | 21 | SauCas9 | 1065 |
| ADORA2A4158 | ATGCCCTGGGGCTGGTGAGTG | 21 | SauCas9 | 1066 |
| ADORA2A4159 | GCCCTGGGGCTGGTGAGTGGA | 21 | SauCas9 | 1067 |
| ADORA2A4160 | TGGTGAGTGGAGGGAGTGCCC | 21 | SauCas9 | 1068 |
| ADORA2A4161 | GAGGGAGTGCCCAAGAGTCCC | 21 | SauCas9 | 1069 |
| ADORA2A4162 | AGGGAGTGCCCAAGAGTCCCA | 21 | SauCas9 | 1070 |
| ADORA2A4163 | GTCTGGGAGGCCCGTGTTCCC | 21 | SauCas9 | 1071 |
| ADORA2A4164 | CATGGCTAAGGAGCTCCACGT | 21 | SauCas9 | 1072 |
| ADORA2A4165 | GAGCTCCTTAGCCATGAGCTC | 21 | SauCas9 | 1073 |
| ADORA2A4166 | GCTCCTTAGCCATGAGCTCAA | 21 | SauCas9 | 1074 |
| ADORA2A4167 | GGCCTAGATGACCCCCTGGCC | 21 | SauCas9 | 1075 |
| ADORA2A4168 | CCCCCTGGCCCAGGATGGAGC | 21 | SauCas9 | 1076 |
| ADORA2A4169 | CTCCTGCTCCATCCTGGGCCA | 21 | SauCas9 | 1077 |
| ADORA2A4416 | CCGTGATGTACACCGAGGAG | 20 | AsCpf1 RR | 1078 |
| ADORA2A4417 | CTTTGCCATCACCATCAGCA | 20 | AsCpf1 RR | 1079 |
| ADORA2A4418 | TTTGCCATCACCATCAGCAC | 20 | AsCpf1 RR | 1080 |
| ADORA2A4419 | TTGCCTGCTTCGTCCTGGTC | 20 | AsCpf1 RR | 1081 |
| ADORA2A4420 | TCCTGGTCCTCACGCAGAGC | 20 | AsCpf1 RR | 1082 |
| ADORA2A4421 | TCTTCAGTCTCCTGGCCATC | 20 | AsCpf1 RR | 1083 |
| ADORA2A4422 | GTCTCCTGGCCATCGCCATT | 20 | AsCpf1 RR | 1084 |
| ADORA2A4423 | ACCTAGCATGGGAGTCAGGC | 20 | AsCpf1 RR | 1085 |
| ADORA2A4424 | AACCTAGCATGGGAGTCAGG | 20 | AsCpf1 RR | 1086 |
| ADORA2A4425 | ATGCTAGGTTGGAACAACTG | 20 | AsCpf1 RR | 1087 |
| ADORA2A4426 | GCAGCCCTGGGAGTGGTTCT | 20 | AsCpf1 RR | 1088 |
| ADORA2A4427 | CGCAGCCCTGGGAGTGGTTC | 20 | AsCpf1 RR | 1089 |
| ADORA2A4428 | AGGGCTGCGGGGAGGGCCAA | 20 | AsCpf1 RR | 1090 |
| ADORA2A4429 | TGGGGACCACATCCTCAAAG | 20 | AsCpf1 RR | 1091 |
| ADORA2A4430 | CATGAACTACATGGTGTACT | 20 | AsCpf1 RR | 1092 |
| ADORA2A4431 | ATGAACTACATGGTGTACTT | 20 | AsCpf1 RR | 1093 |
| ADORA2A4432 | ACTTCTTTGCCTGTGTGCTG | 20 | AsCpf1 RR | 1094 |
| ADORA2A4433 | TGCTGCTCATGCTGGGTGTC | 20 | AsCpf1 RR | 1095 |
| ADORA2A4434 | CAAATAGACACCCAGCATGA | 20 | AsCpf1 RR | 1096 |
| ADORA2A4435 | GCTGTCGTCGCGCCGCCAGG | 20 | AsCpf1 RR | 1097 |
| ADORA2A4436 | TGGCGGCGCGACGACAGCTG | 20 | AsCpf1 RR | 1098 |
| ADORA2A4437 | TCTGCTTCAGCTGTCGTCGC | 20 | AsCpf1 RR | 1099 |
| ADORA2A4438 | GGCAGAGGCTGGCTCTCCAT | 20 | AsCpf1 RR | 1100 |
| ADORA2A4439 | CGGCAGAGGCTGGCTCTCCA | 20 | AsCpf1 RR | 1101 |
| ADORA2A4440 | CCGGCAGAGGCTGGCTCTCC | 20 | AsCpf1 RR | 1102 |
| ADORA2A4441 | CACTGCAGAAGGAGGTCCAT | 20 | AsCpf1 RR | 1103 |
| ADORA2A4442 | TGCTGCCAAGTCACTGGCCA | 20 | AsCpf1 RR | 1104 |
| ADORA2A4443 | ACAATGATGGCCAGTGACTT | 20 | AsCpf1 RR | 1105 |
| ADORA2A4444 | TACACATCATCAACTGCTTC | 20 | AsCpf1 RR | 1106 |
| ADORA2A4445 | CTTTCTTCTGCCCCGACTGC | 20 | AsCpf1 RR | 1107 |
| ADORA2A4446 | GACTGCAGCCACGCCCCTCT | 20 | AsCpf1 RR | 1108 |
| ADORA2A4447 | TCTCTGGCTCATGTACCTGG | 20 | AsCpf1 RR | 1109 |
| ADORA2A4448 | CAACCGAATTGGTGTGGGAG | 20 | AsCpf1 RR | 1110 |
| ADORA2A4449 | ACACCAATTCGGTTGTGAAT | 20 | AsCpf1 RR | 1111 |
| ADORA2A4450 | GTTGTGAATCCCTTCATCTA | 20 | AsCpf1 RR | 1112 |
| ADORA2A4451 | TTCATCTACGCCTACCGTAT | 20 | AsCpf1 RR | 1113 |
| ADORA2A4452 | TCTACGCCTACCGTATCCGC | 20 | AsCpf1 RR | 1114 |
| ADORA2A4453 | CGAGTTCCGCCAGACCTTCC | 20 | AsCpf1 RR | 1115 |
| ADORA2A4454 | GCCAGACCTTCCGCAAGATC | 20 | AsCpf1 RR | 1116 |
| ADORA2A4455 | CCAGACCTTCCGCAAGATCA | 20 | AsCpf1 RR | 1117 |
| ADORA2A4456 | GCAAGATCATTCGCAGCCAC | 20 | AsCpf1 RR | 1118 |
| ADORA2A4457 | CAAGATCATTCGCAGCCACG | 20 | AsCpf1 RR | 1119 |
| ADORA2A4458 | CAGCCACGTCCTGAGGCAGC | 20 | AsCpf1 RR | 1120 |
| ADORA2A4459 | AGGCAGCTGGCACCAGTGCC | 20 | AsCpf1 RR | 1121 |
| ADORA2A4460 | TCACTGCCATGAGCTGCCAA | 20 | AsCpf1 RR | 1122 |
| ADORA2A4461 | TCTCAACGGCCACCCGCCAG | 20 | AsCpf1 RR | 1123 |
| ADORA2A4462 | CTCAGGGTGGGGAGCACTGC | 20 | AsCpf1 RR | 1124 |
| ADORA2A4463 | CACCCTGAGCGGAGGCCCAA | 20 | AsCpf1 RR | 1125 |
| ADORA2A4464 | ACCCTGAGCGGAGGCCCAAT | 20 | AsCpf1 RR | 1126 |
| ADORA2A4465 | AGGGCATAGCCATTGGGCCT | 20 | AsCpf1 RR | 1127 |
| ADORA2A4466 | CTCACCAGCCCCAGGGCATA | 20 | AsCpf1 RR | 1128 |
| ADORA2A4467 | TCCACTCACCAGCCCCAGGG | 20 | AsCpf1 RR | 1129 |
| ADORA2A4468 | TGGGACTCTTGGGCACTCCC | 20 | AsCpf1 RR | 1130 |
| ADORA2A4469 | CTGGGACTCTTGGGCACTCC | 20 | AsCpf1 RR | 1131 |
| ADORA2A4470 | CCTGGGACTCTTGGGCACTC | 20 | AsCpf1 RR | 1132 |
| ADORA2A4471 | AGGGGAACACGGGCCTCCCA | 20 | AsCpf1 RR | 1133 |
| ADORA2A4472 | CGTCTGGGAGGCCCGTGTTC | 20 | AsCpf1 RR | 1134 |
| ADORA2A4473 | AGACGTGGAGCTCCTTAGCC | 20 | AsCpf1 RR | 1135 |
| ADORA2A4474 | TTGAGCTCATGGCTAAGGAG | 20 | AsCpf1 RR | 1136 |
| ADORA2A4475 | CTGGCCTAGATGACCCCCTG | 20 | AsCpf1 RR | 1137 |
| ADORA2A4476 | TGGCCTAGATGACCCCCTGG | 20 | AsCpf1 RR | 1138 |
| ADORA2A4477 | TCCTGGGCCAGGGGGTCATC | 20 | AsCpf1 RR | 1139 |
| ADORA2A4478 | CTGGCCCAGGATGGAGCAGG | 20 | AsCpf1 RR | 1140 |
| ADORA2A4479 | TGGCCCAGGATGGAGCAGGA | 20 | AsCpf1 RR | 1141 |
| ADORA2A4480 | CGCGAGTTCCGCCAGACCTT | 20 | AsCpf1 RVR | 1142 |
| ADORA2A4481 | CCCTGGGGCTGGTGAGTGGA | 20 | AsCpf1 RVR | 1143 |
| ADORA2A4482 | CCATCGGCCTGACTCCCATGC | 21 | Cas12a | 1174 |

[0395] It will be understood that the exemplary gRNAs disclosed herein are provided to illustrate non-limiting embodiments embraced by the present disclosure. Additional suitable gRNA sequences will be apparent to the skilled artisan based on the present disclosure, and the disclosure is not limited in this respect.

[0396] Additional exemplary gRNAs for use according to the disclosure are listed in the following Tables 13 to 18:

TABLE 13
AsCas12 guide RNAs

| SEQ | | Target Domain |
|---|---|---|
| ID NO | Gene | Sequence (DNA) |
| 2250 | EIF4G2 | AGGCTTTGGCTGGTTCTTTAG |
| 2260 | EIF4G2 | GCTGGTTCTTTAGTCAGCTTC |
| 2270 | EIF4G2 | GTCAGCTTCTTCCTCTGATTC |
| 2280 | EIF4G2 | TAACCAGGTTAGCCACTGATT |
| 2290 | EIF4G2 | ACAAAAGACTTACCTGGAACA |
| 2300 | EIF4G2 | CCGGAAACTCTTGGGTTATAT |
| 2310 | EIF4G2 | CAAGCCAAGAAAGCTTCTTCT |
| 2320 | EIF4G2 | CATGTCATAGAAGTGCACAAA |
| 2330 | EIF4G2 | GGAAGTTGCTGTTATAGCAGT |
| 2340 | EIF4G2 | TGCATTACTGGCTTGAAAGAT |
| 2350 | EIF4G2 | CTGCTCTAACTGTTCTTTGGA |
| 2360 | EIF4G2 | GAAGGAGCAGAGGATGAATCT |
| 2370 | EIF4G2 | ATCGCTGGGGGGGTTTACTTC |
| 2380 | EIF4G2 | CTTCACTAGAAATGTACTGTA |
| 2390 | EIF4G2 | TCTACATGAAGTTTGGGAGAG |
| 2400 | EIF4G2 | GGAGAGATGTTATCTTTAATC |
| 2410 | EIF4G2 | TATATGGTTTGAGGGGATGGA |
| 2420 | EIF4G2 | AGGGGATGGATCCAACTTTAT |
| 2430 | EIF4G2 | TAGGTGAATCAGTGGCTAACC |
| 2440 | EIF4G2 | CAAATCTTAATTTATAGGTGA |
| 2450 | EIF4G2 | ATTTACAAATCTTAATTTATA |
| 2460 | EIF4G2 | CGGGAAAAGGCAAGGCTTTGT |
| 2470 | EIF4G2 | TTGGCTTGGAAAGAAGATATA |
| 2480 | EIF4G2 | TGCACTTCTATGACATGGAAA |
| 2490 | EIF4G2 | AGGCATGTTACTTCGCTTTTT |
| 2500 | EIF4G2 | TTCATGATCACGTTGATCTAC |
| 2510 | EIF4G2 | AAGCCAGTAATGCAGAAATTT |
| 2520 | EIF4G2 | TAGTGAAGTAAACCCCCCCAG |
| 2530 | EIF4G2 | TGTCCAGCTTCTTACAGTACA |
| 2540 | EIF4G2 | TGAACATCTTAATGACTAGGT |
| 2550 | SKP1 | AAGACCTTACCTTTTTTAATA |
| 2560 | SKP1 | CAATGAACTTACCTTCCAACA |
| 2570 | SKP1 | AGCAGGGCAGAATAAAAACCA |
| 2580 | SKP1 | TTCATAATTTCAGCAGGGCAG |
| 2590 | SKP1 | CTTTGTTCATAATTTCAGCAG |
| 2600 | SKP1 | CAGGCTGCAAACTACTTAGAC |
| 2610 | SKP1 | TTGTTGTAGGTCATTCAGTGG |
| 2620 | SKP1 | TTAGATTTGGGAATGGATGAT |
| 2630 | SKP1 | TTCTGGTTTTCTTAGATTTGG |
| 2640 | SKP1 | GATGCCTTCAATTAAGTTGCA |
| 2650 | SKP1 | ATGTCCTTTTTTTTTAGATGC |
| 2660 | RPS3 | AAGCTTTATGCTGAAAAGGTG |
| 2670 | RPS3 | AAGGGCCTGCTATGGTGTGCT |
| 2680 | RPS3 | AAGGAAGCAAGGGATATCCTG |
| 2690 | RPS3 | AGCATAAAGCTTTAAAGGAAG |
| 2700 | RPS3 | CCAGACACCACAACCTCGCAG |
| 2710 | RPS3 | CCAAGCACTCTCAGCTGCTCA |
| 2720 | RPS19 | TTCTTCCATCTTTTCCCACAG |
| 2730 | RPS19 | CCACAGGTGGCAGCTGCCAAC |
| 2740 | RPS19 | TCTGACGTCCCCCATAGATCT |
| 2750 | HMGB1 | AGCCCTCTTACCTTCCACCTC |
| 2760 | HMGB1 | TGTTCATTTATTGAAGTTCTA |
| 2770 | HMGB1 | GTTCGGCCTTCTTCCTCTTCT |
| 2780 | HMGB1 | TAGACCATGTCTGCTAAAGAG |
| 2790 | HMGB1 | GAAAAATAACTAAACATGGGC |
| 2800 | RPL7 | CCCCAAATAGAACCTACCAAG |
| 2810 | RPL7 | ACTTCAGGTACCCCAATCTGA |
| 2820 | RPL7 | CTTTTTCACTTCAGGTACCCC |
| 2830 | RPL7 | TGTTTGCTTTTTCACTTCAGG |
| 2840 | RPL7 | ACCACAGTATCAATGGAGTGA |
| 2850 | RPL7 | TGGTCCGTTTTCACCACAGTA |
| 2860 | RPLP0 | AGGTCAAGGCCTTCTTGGCTG |
| 2870 | RPLP0 | ACCACTTCCCCCCTCCTTTCA |
| 2880 | G6PD | CTCACCTGCCATAAATATAGG |
| 2890 | G6PD | CAGTATGAGGGCACCTACAAG |
| 2900 | G6PD | ACCCCACTGCTGCACCAGATT |
| 2910 | G6PD | CGCCACGTAGGGGTGCCCTTC |
| 2920 | RPL4 | GCTTGTAGTGCCGCTGCTGCA |
| 2930 | RPL4 | CCGTGGTGCTCGAAGGGCTCT |
| 2940 | RPL4 | TTGCAGCACAAGCTCCGGGTG |
| 2950 | RPL4 | TGCCTAATTTGTTGCAGCACA |
| 2960 | RPL4 | TAGCAAGAAGATCCATCGCAG |
| 2970 | RPL4 | AGTCTTCCCATGCACAAGATG |
| 2980 | RPL4 | CCTTTCAGTCTTCCCATGCAC |
| 2990 | EEF1G | TCCCCAGCTGAGTCCAGATTG |
| 3000 | EEF1G | TTCCTCTTAGTACCTTTGTGT |
| 3010 | RPL31 | GATGGCTCCCGCAAAGAAGGG |
| 3020 | RPL31 | AATCGTAGGGGCTTCAAGAAG |
| 3030 | RPL31 | TTAGGAATGTGCCATACCGAA |
| 3040 | RPL31 | CAGATCTACAGACAGTCAATG |
| 3050 | RPL31 | GCACCTTATTCCTTTGGCCCA |
| 3060 | RPL31 | TGGGATGGAGAACTTACTTTT |
| 3070 | RPL31 | ATCTGACGATCAGCGATTAGT |
| 3080 | ITM2B | ACTGTCTTTTTCATATTTTAG |
| 3090 | ITM2B | ATATTTTAGGACCCAGATGAT |
| 3100 | ITM2B | GGACCCAGATGATGTGGTACC |
| 3110 | ITM2B | GACTAGCATTTATGCTTGCAG |
| 3120 | ITM2B | TGCTTGCAGGTGTTATTCTAG |
| 3130 | ITM2B | TGAATGTAGGCTGGAACCTAT |
| 3140 | ITM2B | CCTCAGTCCTATCTGATTCAT |
| 3150 | ITM2B | TTTATTTATCGACTGTGTCAT |
| 3160 | ITM2B | TTTATCGACTGTGTCATGACA |
| 3170 | ITM2B | TCGACTGTGTCATGACAAGGA |
| 3180 | ITM2B | CCTCTCCAACAGGTATTCAGA |
| 3190 | ITM2B | GCAATTCGGCATTTTGAAAAC |
| 3200 | ITM2B | AAAACAAATTTGCCGTGGAAA |
| 3210 | ITM2B | CCGTGGAAACTTTAATTTGTT |
| 3220 | ITM2B | GCCAACTGGTACCACATCATC |
| 3230 | ITM2B | TACAAGTATGCTCCTCCTAGA |
| 3240 | ITM2B | CACTTACTTGAAGTGCAAAAT |
| 3250 | ITM2B | AATGCGATCAGTAATAACCAT |
| 3260 | ITM2B | CTTGTCATGACACAGTCGATA |
| 3270 | ITM2B | TAAGTTTCCTTGTCATGACAC |
| 3280 | ITM2B | TCTGCGTTGCAGTTTGTAAGT |
| 3290 | ITM2B | ATAGTTTCTCTGCGTTGCAGT |
| 3300 | ITM2B | AAAAGTATTACCTTTAATAGT |
| 3310 | ITM2B | ATATTTAAAAAGTATTACCTT |
| 3320 | ITM2B | AAAATGCCGAATTGCGAAACA |
| 3330 | ITM2B | TTTTCAAAATGCCGAATTGCG |
| 3340 | ITM2B | CACGGCAAATTTGTTTTCAAA |
| 3350 | ITM2B | TTGACTGTTCAAGAACAAATT |
| 3360 | RPL23A | CTTTTCTCCCAGCTCCTGCCC |
| 3370 | RPL23A | TCCCAGCTCCTGCCCCTCCTA |
| 3380 | RPL23A | CCTCTCCCAGGCTTGACCACT |
| 3390 | RPL23A | TTTTTCAGATTGGGATCATCT |
| 3400 | RPL23A | TAGGAAGGAAACTTACTTTGT |
| 3410 | RPL27A | GTCTGGGCTGCCAACATGGTA |
| 3420 | RPL27A | TATTCCTGCAGGCAAGCACCG |
| 3430 | RPL27A | TCTGTTCTTCTAGGGCTACTA |
| 3440 | PCBP2 | CCCTCTGACTCTCTCCCAGTC |
| 3450 | PCBP2 | CTCCTTTTGTAGGCCTATACC |
| 3460 | PCBP2 | TAGGCCTATACCATTCAAGGA |
| 3470 | PCBP2 | CTCCTTGCAGTTGACCAAGCT |
| 3480 | PCBP2 | ACTTGTATCTTAACAGGCATT |
| 3490 | PCBP2 | GCAGGTTTGGATGCATCTGCT |
| 3500 | PCBP2 | TTTCTCCCTTAAGTTGATTGG |
| 3510 | PCBP2 | TCCCTTAAGTTGATTGGCTGC |
| 3520 | PCBP2 | TGTGTTACAGGCTTTCCTCGG |
| 3530 | PCBP2 | AGCATGAGCCTGAGGGCTTAC |
| 3540 | PCBP2 | TTACCTGACCACCTGCAAAGA |
| 3550 | PCBP2 | ATCATTACCCCAATAGCCTTT |
| 3560 | HSPA8 | TCTTCCTCAGACTGCTGAGAA |
| 3570 | HSPA8 | CTAGGCCGTTTGAGCAAGGAA |
| 3580 | HSPA8 | TTTCCTAGGCCGTTTGAGCAA |
| 3590 | HNRNPK | ATCAGCACTGAAACCAACCTG |
| 3600 | HNRNPK | AGTTGGCTGGATCTATTATTG |
| 3610 | HNRNPK | AAAAATCTTTTCAGTTGGCTG |
| 3620 | HNRNPK | AATCAGATTATTCCTATGCAG |
| 3630 | HNRNPK | TGTTTTTAGGGTGGCTCCGGA |
| 3640 | HNRNPK | TTTCTGTTTTTAGGGTGGCTC |
| 3650 | HNRNPK | TCTCTAACAGGTTGGTTTCAG |
| 3660 | RPL5 | TCTCTTACTATAGATTGCTTA |
| 3670 | RPL5 | CATTGGTTTCTTGAATAGCTT |
| 3680 | RPL5 | TTGAATAGCTTCTCAATAGGT |
| 3690 | UBL5 | TGTAGCTCCAGCTAGGATGAT |
| 3700 | UBL5 | CCTTAACTGCTCTGCGCCCAG |
| 3710 | UBL5 | TTAGGTACACGATTTTTAAGG |
| 3720 | UBL5 | CTTCAGATGAAATCCACGATG |
| 3730 | CST3 | GACAAGGTCATTGTGCCCTGC |
| 3740 | CST3 | AGATGTGGCTGGTCATGGAAG |
| 3750 | CST3 | TTGTACTCGCCGACGGCAAAG |
| 3760 | CST3 | CAGATCTACGCTGTGCCTTGG |
| 3770 | CST3 | ACAGAAAGCATTCTGCTCTTT |
| 3780 | CST3 | CTTTCACAGAAAGCATTCTGC |
| 3790 | CST3 | ACATGTGTAGATCGTAGCTGG |
| 3800 | CST3 | CCGTCGGCGAGTACAACAAAG |
| 3810 | RPS29 | TCACCAAGAGCGAGAACCCTG |
| 3820 | RPS29 | TTACAGTCGTGTCTGTTCAAA |
| 3830 | RPS10 | TACTGTACATGCTTCCTTTTT |
| 3840 | RPS10 | CAAATGACATTATCTGAGAGC |
| 3850 | RPS10 | CTCACGTGGCACAGCACTCCG |
| 3860 | RPS10 | TGTGGGAACCATACCTTTAGG |
| 3870 | RPS10 | TAAAAAGGAAGCATGTACAGT |
| 3880 | RPS10 | TCCTATGGCAGGTCCTCATAG |
| 3890 | RPS10 | TAGCTGGTGCCGACAAGAAAG |
| 3900 | RPS10 | ACTTTCTAGCTGGTGCCGACA |
| 3910 | RPS10 | CATAGGTCTGGAGGGTGAGCG |
| 3920 | RPS10 | ATTTACATAGGTCTGGAGGGT |
| 3930 | RPS10 | TGCCTTACAGTCTCTCAAGTC |
| 3940 | RPL6 | TTACCAGTCACAAGTAATAAG |
| 3950 | RPL6 | GAAATATGAGATTACGGAGCA |
| 3960 | RPL6 | TTTAGAAATATGAGATTACGG |
| 3970 | RPL6 | TCTTTATTTAGAAATATGAGA |
| 3980 | RPL6 | ATTTTCTCTTTATTTAGAAAT |
| 3990 | RPL6 | CCCCTTAGGACCTCTGGTCCT |
| 4000 | RPL6 | ACTTACAGAGGGTGGTTTTCC |
| 4010 | RPL6 | TTTTTAACTTACAGAGGGTGG |
| 4020 | RPLP2 | TGTAGGTATTGGCAAGCTTGC |
| 4030 | ARF1 | ACACTGGCTGCCCGGCAGGCC |
| 4040 | RPL15 | TGTGTAGGTTACGTTATATAT |
| 4050 | RPL15 | CTATTCTAGGAGCGAGCTGGA |
| 4060 | RPL15 | CCTCTGCAACGGACTGAAGGC |
| 4070 | FAU | CTGGCCGGTCACCTCGAAGGT |
| 4080 | FAU | CCTGTAGGCTCATGTAGCCTC |
| 4090 | FAU | CTCAGTCGCCAATATGCAGCT |
| 4100 | FAU | TTTACTCAGTCGCCAATATGC |
| 4110 | RPL36 | CCCCCTAGCGTCTGACCAAAC |
| 4120 | RPL36 | CCCCGTACGAGCGGCGCGCCA |
| 4130 | NACA | CTAGTATACCTCTTCCTCTTC |
| 4140 | NACA | CTCACCTTGGCTTCCCCAAAA |
| 4150 | NACA | AAATCTTACCTTCCGTGCCTT |
| 4160 | NACA | TCTGTTACAGGAATTAACAAT |
| 4170 | NACA | CCTCTCATCTCTCAGGTCGAT |
| 4180 | NACA | TACCCTGTAGATCGAAGATTT |
| 4190 | NACA | GGCTATGTCCAAACTGGGTCT |
| 4200 | NACA | TCTTCTTTAGGCTATGTCCAA |
| 4210 | NACA | TCTTCTTAGCTGGCGGCAGCA |
| 4220 | PRDX1 | GACATCAGGCTTGATGGTATC |
| 4230 | PRDX1 | CCATGCTAGATGACAGAAGTG |
| 4240 | PRDX1 | TTAAATTCTTCTGCCCTATCA |
| 4250 | PRDX1 | TCTTGCAGTGTGCCCAGCTGG |
| 4260 | PRDX1 | TCATTGATGATAAGGGTATTC |
| 4270 | PRDX1 | CCAGGGGCCTTTTTATCATTG |
| 4280 | PRDX1 | ATCTCTTTTCCCAGGGGCCTT |
| 4290 | PRDX1 | CTTTCATCTCTTTTCCCAGGG |
| 4300 | PRDX1 | GTATCAGACCCGAAGCGCACC |
| 4310 | PRDX1 | CCATAGGGTCAATACACCTAA |
| 4320 | PRDX1 | CCTTTTGCCATAGGGTCAATA |
| 4330 | PRDX1 | AGTGATAGGGCAGAAGAATTT |
| 4340 | PRDX1 | CCCTCTTGACTTCACCTTTGT |
| 4350 | PRDX1 | CCCCCAGGAAAATATGTTGTG |
| 4360 | ALDOA | CCTTCTCGGTCACATACTGGC |
| 4370 | NCL | GCCCAGTCCAAGGTAACTTTA |
| 4380 | NCL | TTTCCATCAATTTCACCGTCT |
| 4390 | NCL | CATCAATTTCACCGTCTTCCA |
| 4400 | NCL | ACCGTCTTCCATGGCCTCCTT |
| 4410 | NCL | GCATCCTCCTCACTGTTGAAG |
| 4420 | NCL | GAGGACCCAGTTTCCCGGTCA |
| 4430 | NCL | CCGGTCAGTAACTATCCTTGC |
| 4440 | NCL | ATGTCTCTTCAGTGGTATCCT |
| 4450 | NCL | ACAAACAGAGTTTTGGATGGC |
| 4460 | NCL | GTGGCAGAGGCCGGGGAGGCT |
| 4470 | NCL | GAGGACGAGGTGGTGGTAGAG |
| 4480 | NCL | TAGACTTCAACAGTGAGGAGG |
| 4490 | NCL | GTTTTGTAGACTTCAACAGTG |
| 4500 | NCL | GTGTTCTAGGTTTGGTTTTGT |
| 4510 | NCL | ATTTGGTGTTCTAGGTTTGGT |
| 4520 | NCL | ACGGCTCCGTTCGGGCAAGGA |
| 4530 | NCL | TCAAAGGCCTGTCTGAGGATA |
| 4540 | NCL | CTTCCCAGAGCCATCCAAAAC |
| 4550 | BTF3 | TAGATGAAAGAAACAATCATG |
| 4560 | BTF3 | CTCTTCTCCCTGACTTTAGGG |
| 4570 | BTF3 | GGGAACTGCTCGCAGAAAGAA |
| 4580 | BTF3 | TTTTCTTAATAGGTGAATATG |
| 4590 | BTF3 | TTAATAGGTGAATATGTTTAC |
| 4600 | BTF3 | CATTTTCCTTTCATAGCTGTG |
| 4610 | BTF3 | CTTTCATAGCTGTGGATGGAA |
| 4620 | BTF3 | ATAGCTGTGGATGGAAAAGCA |
| 4630 | BTF3 | TACTCTTTTCCTTTTCCTAGA |
| 4640 | BTF3 | CTTTTCCTAGATCTTGTGGAG |
| 4650 | BTF3 | CTAGATCTTGTGGAGAATTTT |
| 4660 | BTF3 | ATACTTGCCTCTTCAATACCA |
| 4670 | E2F4 | GGGGCTATCATTGTAGTGAGT |
| 4680 | E2F4 | AGCCCATCAAGGCAGACCCCA |
| 4690 | E2F4 | AGTTTTGGAACTCCCCAAAGA |
| 4700 | E2F4 | GAACTCCCCAAAGAGCTGTCA |
| 4710 | E2F4 | CCCCTCTGCTTCGTCTTTCTC |
| 4720 | E2F4 | TCCACCCCCGGGAGACCACGA |
| 4730 | E2F4 | ATGTGCCTGTTCTCAACCTCT |
| 4740 | E2F4 | TGACAGCTCTTTGGGGAGTTC |
| 4750 | KIF11 | ACTAAGCTTAATTGCTTTCTG |
| 4760 | KIF11 | TGGAACAGGATCTGAAACTGG |
| 4770 | KIF11 | TACCCATCAACACTGGTAAGA |
| 4780 | KIF11 | TTCTTTTAGGATGTGGATGTA |
| 4790 | KIF11 | GGATGTGGATGTAGAAGAGGC |
| 4800 | KIF11 | CCGCCTTAAATCCACAGCATA |
| 4810 | KIF11 | ATTAAGTTCTAGATTTTGTGC |
| 4820 | KIF11 | TGGTTTCATTAAGTTCTAGAT |
| 4830 | KIF11 | AGATCCTGTTCCAGAAAGCAA |
| 4840 | KIF11 | AAGTACCTGTTGGGATATCCA |
| 4850 | KIF11 | TCTTTTAAAGTACCTGTTGGG |
| 4860 | KIF11 | AGCTGATCAAGGAGATGTTCA |
| 4870 | KIF11 | CTTTTCAGCTGATCAAGGAGA |
| 4880 | KIF11 | GCATCATTAACAGCTCAGGCT |
| 4890 | KIF11 | TGAACAGTTTAGCATCATTAA |
| 4900 | KIF11 | TTGTTTTCTGAACAGTTTAGC |
| 4910 | KIF11 | CCGGAATTGTCTCTTCTTTGT |
| 4920 | KIF11 | AATTTACCGGAATTGTCTCTT |
| 4930 | KIF11 | TCTTTTCCATGTGATTTTTTA |
| 4940 | KIF11 | TTTGTCTTTTCCATGTGATTT |
| 4950 | KIF11 | GACCTCTCCAGTGTGTTAATG |
| 4960 | KIF11 | TTCCACTTTAGACCTCTCCAG |
| 4970 | KIF11 | TAACCAAGTGCTCTGTAGTTT |
| 4980 | RPL13 | TCTTCTAGGTCTATAAGAAGG |
| 4990 | RPL13 | AGTAAGTGTTCACTTACGTTC |
| 5000 | PFDN5 | CCTTAATTCTTGCTTCTCAGA |
| 5010 | PFDN5 | AGCTGAGCAATGGACGTGGAC |
| 5020 | PTMA | AAGGACTTAAAGGAGAAGAAG |
| 5030 | PTMA | TGTCGAGGAGAATGAGGAAAA |
| 5040 | PTMA | ATTCTCTCCAGGTGAGGAAGA |
| 5050 | PTMA | TCTGCTTAGGATGACGATGTC |
| 5060 | RPL11 | GCATCCGGAGAAATGAAAAGA |
| 5070 | RPL11 | TCCACAGGTGCGGGAGTATGA |
| 5080 | RPL11 | AGCATCGCAGACAAGAAGCGC |
| 5090 | RPL11 | AGTATGATGGGATCATCCTTC |
| 5100 | RPL11 | CGGATGCGAAGTTCCCGCATG |
| 5110 | RPL11 | TCCGGATGCCAAAGGATCTGA |
| 5120 | RPL11 | ATTTCTCCGGATGCCAAAGGA |
| 5130 | RPL11 | GACCCTTCTCCAAGATTTCTT |
| 5140 | RPL11 | TTAACTCATACTCCCGCACCT |
| 5150 | RPL11 | CCTTCTGCTGGAACCAGCGCA |
| 5160 | COX7C | TCTTTTTTTCCAACAGAATTT |
| 5170 | COX7C | CAACAGAATTTGCCATTTTCA |
| 5180 | RPL8 | TTGAGGCCCTCAGCACTAGTT |
| 5190 | RPL8 | CGGCCAGCAGGGGCATCTCTG |
| 5200 | RPL8 | TGGGTTACTTACATTCATGGC |
| 5210 | RPL8 | TCTGCCTGCAGCCTGTGGAGC |
| 5220 | RPL10 | TTCTCCCTACCTAGCCCTGGA |
| 5230 | RPL10 | CATTGCTCCTTAGATCCACAT |
| 5240 | RPL32 | CCTCCCCAAAAGGAAGAGTTC |
| 5250 | TBP | CTGCGGTAATCATGAGGATAA |
| 5260 | TBP | AGTTCTGGGAAAATGGTGTGC |
| 5270 | TBP | CTTTCCCTAGTGAAGAACAGT |
| 5280 | TBP | CCTAGTGAAGAACAGTCCAGA |
| 5290 | TBP | CAGCTAAGTTCTTGGACTTCA |
| 5300 | TBP | CTATAAGGTTAGAAGGCCTTG |
| 5310 | TBP | CAATTTTCCTTCTAGTTATGA |
| 5320 | TBP | CTTCTAGTTATGAGCCAGAGT |
| 5330 | TBP | CTGGTTTAATCTACAGAATGA |
| 5340 | TBP | ATCTACAGAATGATCAAACCC |
| 5350 | TBP | TTTCTGGAAAAGTTGTATTAA |
| 5360 | TBP | TGGAAAAGTTGTATTAACAGG |
| 5370 | TBP | GGTCAAGITTACAACCAAGAT |
| 5380 | TBP | GGGCACGAAGTGCAATGGTCT |
| 5390 | TBP | CCAGAACTGAAAATCAGTGCC |
| 5400 | TBP | TTACGGCTACCTCTTGGCTCC |
| 5410 | TBP | TTGCTGCCAGTCTGGACTGTT |
| 5420 | TBP | AGACTTACCTACTAAATTGTT |
| 5430 | TBP | ATCATTCTGTAGATTAAACCA |
| 5440 | TBP | CAGAAACAAAAATAAGGAGAA |
| 5450 | TBP | AAATGCTTCATAAATTTCTGC |
| 5460 | CD63 | CTCAGCCAGCCCCCAATCTTC |
| 5470 | CD63 | TCCCAATCTGTGTAGTTAGCA |
| 5480 | CD63 | GGGTAATTCTCCATCTGCTGC |
| 5490 | CD63 | GGAATTGTCTTTGCCTGCTGC |
| 5500 | CD63 | CTTCTAGGTTTTGGGAATTGT |
| 5510 | CD63 | TGCCTGCCACCTTCAGGGCTG |
| 5520 | CD63 | AACGAGAAGGCGATCCATAAG |
| 5530 | CD63 | AGTGCTGTGGGGCTGCTAACT |
| 5540 | CD63 | TTCCCTCCCCCAGTTTAAGTG |
| 5550 | CD63 | ATAACAACTTCCGGCAGCAGA |
| 5560 | CD63 | TGTCTCTTATCATGTTGGTGG |
| 5570 | CD63 | CCATCTTTCTGTCTCTTATCA |
| 5580 | CD63 | CTCCTGCAGTTTGCCATCTTT |
| 5590 | CD63 | TGGGCTGCTGCGGGGCCTGCA |
| 5600 | RPS24 | TGTTTTCAGAACGACACCGTA |
| 5610 | RPS24 | AGAACGACACCGTAACTATCC |
| 5620 | RPS24 | GGTCATTGATGTCCTTCACCC |
| 5630 | RPS24 | TCATTCAGCATGGCCTGTATG |
| 5640 | RPS24 | CCTCTTCTTCTGGATTACAGA |
| 5650 | RPS24 | TAGTGCGGATAGTTACGGTGT |
| 5660 | RPS24 | CTTAATGAACTATACCTTTTT |
| 5670 | RPS23 | GGGCTGTGCCCAAATGAGCTT |
| 5680 | RPS23 | TTCCAGGAAAATGATGAAGTT |
| 5690 | RPS23 | TACCCAATGACGGTTGCTTGA |
| 5700 | RPS23 | AGAGGAGTTGAAGCCAAACAG |
| 5710 | RPS23 | TATTTCAGAGGAGTTGAAGCC |
| 5720 | RPS23 | GGCAAGTGTCGTGGACTTCGT |
| 5730 | RPS23 | ATTTTTAGGCAAGTGTCGTGG |
| 5740 | EEF2 | TCCAGGAAGTTGTCCAGGGCA |
| 5750 | EEF2 | AGGCCCTTGCGCTTGCGGGTC |
| 5760 | EEF2 | ACCACTGGCAGATCCTGCCCG |
| 5770 | EEF2 | TGGTCAAGGCCTATCTGCCCG |
| 5780 | EEF2 | AACAGGAAGCGGGGCCACGTG |
| 5790 | EEF2 | CCTTCTGGCAGTGTCCAGAGC |
| 5800 | EEF2 | TTTCCCTTCTGGCAGTGTCCA |
| 5810 | CALR | CTTCTCCCTTCTGCAGGGTGA |
| 5820 | CALR | GCGTGCTGGGCCTGGACCTCT |
| 5830 | CALR | ACAACTTCCTCATCACCAACG |
| 5840 | CALR | GCAACGAGACGTGGGGCGTAA |
| 5850 | CALR | TGGGTGGATCCAAGTGCCCTT |
| 5860 | CALR | CTCCAAGTCTCACCTGCCAGA |
| 5870 | CALR | TTACGCCCCACGTCTCGTTGC |
| 5880 | CALR | TCCTTCATTTGTTTCTCTGCT |
| 5890 | CALR | TTGTCTTCTTCCTCCTCCTTA |
| 5900 | CALR | TCCTCATCATCCTCCTTGTCC |
| 5910 | RPL36AL | TATGCCCAGGGAAGGAGGCGC |
| 5920 | SRP14 | AGGCTTATTCAAACCTCCTTA |
| 5930 | SRP14 | AGGTGAGCTCCAAGGAAGTGA |
| 5940 | SRP14 | CTTCTTTTTCAGGTGAGCTCC |
| 5950 | SRP14 | CTTCAGATGACGGTCGAACCA |
| 5960 | SRP14 | CAGAAGTGCCGGACGTCGGGC |
| 5970 | SRP14 | CAGTTCCTGACGGAGCTGACC |
| 5980 | GABARAP | TTTCGGATCTTCTCGCCCTCA |
| 5990 | GABARAP | GGATCTTCTCGCCCTCAGAGC |
| 6000 | GABARAP | TCTACATTGCCTACAGTGACG |
| 6010 | GABARAP | ATCCCAGGAACACCATGAAGA |
| 6020 | GABARAP | TGCTTTCATCCCAGGAACACC |
| 6030 | GABARAP | TCAACAATGTCATTCCACCCA |
| 6040 | GABARAP | TTTGTCAACAATGTCATTCCA |
| 6050 | GABARAP | CAGTTGGTCAGTTCTACTTCT |
| 6060 | GABARAP | TTGCATCTTGTATCTTTTGCA |
| 6070 | GABARAP | TCAGGTGATAGTAGAAAAGGC |
| 6080 | GABARAP | ATCTCTTTATCAGGTGATAGT |
| 6090 | RPSA | ATAATCTGCCACTCTTGGCAG |
| 6100 | RPSA | TAACCCAGATTGAAAAAGAAG |
| 6110 | RPSA | GTATTCTCTTAACAGAAGACT |
| 6120 | RPSA | GAGAAGCTTACCTCTTCAGGA |
| 6130 | SET | AATTATTTATTACAGTATTTT |
| 6140 | SET | TTACAGTATTTTGATGAAAAT |
| 6150 | SET | GGATTTGACGAAACGTTCGAG |
| 6160 | SET | ACGAAACGTTCGAGTCAAACG |
| 6170 | SET | AGGTTCCCGATATGGATGATG |
| 6180 | SET | TTTCAGGAGGATGAAGGAGAA |
| 6190 | SET | AGGAGGATGAAGGAGAAGATG |
| 6200 | SET | TTTTACCTCTCCTTCCTCCCC |
| 6210 | SET | GCCAAATTTTCTTTTACCTCT |
| 6220 | GAPDH | CAGACCACAGTCCATGCCATC |
| 6230 | GAPDH | ATCTTCTAGGTATGACAACGA |
| 6240 | RPLP1 | TTTGTTGTAGGAGGATAAGAT |
| 6250 | RPLP1 | TTGTAGGAGGATAAGATCAAT |
| 6260 | RPLP1 | TAGCTGAGGAGAAGAAAGTGG |
| 6270 | RPLP1 | CCACCATCACCTTACCTTTGC |
| 6280 | RPLP1 | CTACCTGGAGCAGCAGCAGTG |
| 6290 | CFL1 | CTCTTAAGGGGCGCAGACTCG |
| 6300 | CFL1 | TAGGGATCAAGCATGAATTGC |
| 6310 | CFL1 | TTCTTTATAGGGATCAAGCAT |
| 6320 | CFL1 | TGTCCAGGGCCCCCGAGTCTG |
| 6330 | RPS15 | CTCTTGGTCTCCCGCAGCCCG |
| 6340 | TPT1 | CATTATTTATTTTAACCCACT |
| 6350 | TPT1 | TTTTAACCCACTTCCTTGTAC |
| 6360 | TPT1 | ACCCACTTCCTTGTACTTACA |
| 6370 | TPT1 | CCTGGTAGTTTTTGAAATTAG |
| 6380 | TPT1 | GAAATGGAAAAATGTGTAAGT |
| 6390 | TPT1 | CTTCCCAAGTTCTTTATTGGT |
| 6400 | TPT1 | TTTGCTTCCCAAGTTCTTTAT |
| 6410 | TPT1 | GAATCAAAGGGAAACTTGAAG |
| 6420 | TPT1 | TTAATGCAGATGGTCAGTAGG |
| 6430 | RPL23 | CTACCTTTCATCTCGCCTTTA |
| 6440 | RPL23 | TTGTTCACTATGACTCCTGCA |
| 6450 | RPL23 | CTCACCCTTTTTTCTGAGCTC |
| 6460 | RPL23 | ATGCAGGTTCTGCCATTACAG |
| 6470 | RPL23 | TTTTTTTAATGCAGGTTCTGC |
| 6480 | RPL23 | TTCTCTCAGTACATCCAGCAG |
| 6490 | RPL34 | ACTTTCTAGGTCCCGAACCCC |
| 6500 | RPL34 | TAGGTCCCGAACCCCTGGTAA |
| 6510 | RPL34 | TTATGCAGGTTCGTGCTGTAA |
| 6520 | RPL34 | GTATTTTCCTTTCTAGGATCA |
| 6530 | RPL34 | CTTTCTAGGATCAAGCGTGCT |
| 6540 | RPL34 | TAGGATCAAGCGTGCTTTCCT |
| 6550 | RPL34 | AGAAATACTTACAGCCTAGTT |
| 6560 | RPL34 | ACTTACCTGTCACGAACACAT |
| 6570 | RPL34 | AGCATTTAACTTACCTGTCAC |
| 6580 | COX4I1 | TCTTTCAGAATGTTGGCTACC |
| 6590 | COX4I1 | AGAATGTTGGCTACCAGGGTA |
| 6600 | COX4I1 | CACCTCTGTGTGTGTACGAGC |
| 6610 | COX4I1 | TTCAATATGTTTTTCAGAAAG |
| 6620 | COX4I1 | AGAAAGTGTTGTGAAGAGCGA |
| 6630 | COX4I1 | GCTCCCAGCTTATATGGATCG |
| 6640 | COX4I1 | CTGAGATGAACAGGGGCTCGA |
| 6650 | COX4I1 | ACCGCGCTCGTTATCATGTGG |
| 6660 | COX4I1 | ACAAAGAGTGGGTGGCCAAGC |
| 6670 | COX4I1 | TCAAAGCTTTGCGGGAGGGGG |
| 6680 | COX4I1 | GTAGTCCCACTTGGAGGCTAA |
| 6690 | RPL27 | TCCTTGCTCTCTGCAGAAATG |
| 6700 | RPL27 | GAACATTGATGATGGCACCTC |
| 6710 | RPL27 | TCCCCAGGTACTCTGTGGATA |
| 6720 | RPL27 | CCTTCTAGATACAAGACAGGC |
| 6730 | RPL27 | CGTCCGGAGTAGCGTCCAGCC |
| 6740 | RPL27 | TCTTTGATCTCTTGGCGATCT |
| 6750 | RPL27 | ACAAAAGATTTTATCTTTGAT |
| 6760 | EDF1 | GAGGCTTTGTGTTCATTTCGC |
| 6770 | EDF1 | TGTTCATTTCGCCCTAGGCCC |
| 6780 | EDF1 | GCCCTAGGCCCCTTCTCGATG |
| 6790 | EDF1 | CAATGTCCTTTCCCCGGAGCT |
| 6800 | EDF1 | CCAAGCACCTGGTTATTGGGT |
| 6810 | EDF1 | TTGGAAGTCTCCACATCTTCT |
| 6820 | EDF1 | GCCTGGGCGGCCGTAGGGCCC |
| 6830 | EDF1 | AGGCCTCAAGCTCCGGGGAAA |
| 6840 | EDF1 | GAAAATCAATGAGAAGCCACA |
| 6850 | EDF1 | CCTCACACCGACTCCAGGGGC |
| 6860 | EDF1 | TAGGCTATCTTAGCGGCACAG |
| 6870 | EDF1 | TAATTTTCTAGGCTATCTTAG |
| 6880 | TMEM59 | AAAGAAAAATGCTTAAATTTC |
| 6890 | TMEM59 | AGAATGAGCAAGATTCACTTT |
| 6900 | TMEM59 | TAGGTAGAGGCCCTGCTTCTT |
| 6910 | TMEM59 | GATCTAACAACCACAAGAGAA |
| 6920 | TMEM59 | GCTTTTGTTCATTCATAAACT |
| 6930 | TMEM59 | TTCATTCATAAACTCCAAGTC |
| 6940 | TMEM59 | CCTCAGAGGGAACATACTGCT |
| 6950 | TMEM59 | TCCATCTTCAAGAAAATTCCT |
| 6960 | TMEM59 | CTTAGAGATGATTCTCTCAAA |
| 6970 | TMEM59 | TAGGCTCCTGCTCCAAATGTG |
| 6980 | TMEM59 | CGTCATCGGCTTGAAGATAAA |
| 6990 | TMEM59 | TGAATGAACAAAAGCTAAACA |
| 7000 | TMEM59 | CAGAAGCTGAGTATCTATGGT |
| 7010 | TMEM59 | TTTTGCAGAAGCTGAGTATCT |
| 7020 | TMEM59 | TTGTGCAACTGTTGCTACAGC |
| 7030 | TMEM59 | GATTTGTTGTGCAACTGTTGC |
| 7040 | TMEM59 | ACTACAACTCTTGTCCTCTCG |
| 7050 | TMEM59 | CAGTAACTCTGGGTGGATTTT |
| 7060 | TMEM59 | TTGAAGATGGAGAAAGTGATG |
| 7070 | TMEM59 | AGCAGATCTGCAAATGAGAAA |
| 7080 | TMEM59 | AGAGAATCATCTCTAAGCAAA |
| 7090 | TMEM59 | GAGCAGGAGCCTACAAATTTG |
| 7100 | TMEM59 | GTCTAAGCCAGAAATCCAGTA |
| 7110 | TMEM59 | ATTATTATTTTAGTCTAAGCC |
| 7120 | TMEM59 | TCTTCAAGCCGATGACGGAAA |
| 7130 | DYNLL1 | TCTTTTCCAGGAATTTGACAA |
| 7140 | DYNLL1 | CAGGAATTTGACAAGAAGTAC |
| 7150 | DYNLL1 | ATGTGTCACATAACTACCGAA |
| 7160 | NME2 | TTTCTTAGGAACATCATTCAT |
| 7170 | NME2 | TTAGGAACATCATTCATGGCA |
| 7180 | TMBIM6 | GCTGATGGCAACACCTCATAG |
| 7190 | TMBIM6 | TGTTTTCTAGGAGTTGGCCTG |
| 7200 | TMBIM6 | TAGGAGTTGGCCTGGGCCCTG |
| 7210 | TMBIM6 | TATTGCTGTCAACCCCAGGTA |
| 7220 | TMBIM6 | TAACAGCATCCTTCCCACTGC |
| 7230 | TMBIM6 | ATGGGCACGGCAATGATCTTT |
| 7240 | TMBIM6 | CCTGCTTCACCCTCAGTGCAC |
| 7250 | TMBIM6 | CTGTGTCTTATAGGTATCTTG |
| 7260 | TMBIM6 | TCTTCCCTGGGGAATGTTTTC |
| 7270 | TMBIM6 | GATCCATTTGGCTTTTCCAGG |
| 7280 | TMBIM6 | TTAGGCAAACCTGTATGTGGG |
| 7290 | TMBIM6 | ATACTCAACTCATTATTGAAA |
| 7300 | TMBIM6 | AGGCACTGCATTGATCTCTTC |
| 7310 | TMBIM6 | ATTACTGTCTTCAGAAAACTC |
| 7320 | TMBIM6 | TCCATTTCTAGGATAAGAAGA |
| 7330 | TMBIM6 | TAGGATAAGAAGAAAGAGAAG |
| 7340 | TMBIM6 | ATGGCTATGAGGTGTTGCCAT |
| 7350 | TMBIM6 | TGTTCAGTTTCATGGCTATGA |
| 7360 | TMBIM6 | CCAGITCACACTTACCTCCCA |
| 7370 | TMBIM6 | AATAATGAGTTGAGTATCAAA |
| 7380 | TMBIM6 | TGAAGACAGTAATGAAATCTA |
| 7390 | TMBIM6 | ATTCATGGCCAGGATCATCAT |
| 7400 | TMBIM6 | GGTTGTAGGCTAACTAACCTT |
| 7410 | RPS7 | TTTAGGAAATTGAAGTTGGTG |
| 7420 | RPS7 | GGAAATTGAAGTTGGTGGTGG |
| 7430 | RPS7 | CCTTACAGAGGAGAATTCTGC |
| 7440 | RPS7 | AACTATTCTTTTAGCCGTACT |
| 7450 | RPS7 | GCCGTACTCTGACAGCTGTGC |
| 7460 | RPS7 | TTTTCTTGTAGGTTGAAACTT |
| 7470 | RPS7 | TTGTAGGTTGAAACTTTTTCT |
| 7480 | RPS7 | TGAAACTACTAAAATACTCAC |
| 7490 | ACTB | CTTCCCAGGGCGTGATGGTGG |
| 7500 | NPM1 | ATTTGTAGTGATGATGATGAT |
| 7510 | NPM1 | TAATTGCAGTCTATACGAGAT |
| 7520 | NPM1 | GAAATTCATTTCTTTTTCAGG |
| 7530 | NPM1 | TTTTTCAGGGACAAGAATCCT |
| 7540 | NPM1 | AGGGACAAGAATCCTTCAAGA |
| 7550 | NPM1 | TCTTAATAGGGTGGTTCTCTT |
| 7560 | NPM1 | CAGGCTATTCAAGATCTCTGG |
| 7570 | NPM1 | TAAAATCATACTTACTCTTCA |
| 7580 | NPM1 | CTCACTTTTTCTATACTTGCT |
| 7590 | RPS6 | TTTTTCTTGGTACGCTGCTTC |
| 7600 | RPS6 | GGGCCCAGGCGGCGAGGCACT |
| 7610 | RPS6 | GGAGGCTAAGGAGAAGCGCCA |
| 7620 | RPS6 | TTTAGGAGGCTAAGGAGAAGC |
| 7630 | RPS6 | TTTTGTTTAGGAGGCTAAGGA |
| 7640 | RPS6 | GGTAAGAAACCTAGGACCAAA |
| 7650 | RPS6 | AATTTTTAGGTAAGAAACCTA |
| 7660 | RPS6 | TTCTAAGGAGAGAAGGATATT |
| 7670 | RPL12 | CTTAAAGGAACCATTAAAGAG |
| 7680 | RPL12 | TTTACTTAAAGGAACCATTAA |
| 7690 | RPL12 | CTCTTCTGCAGTTAAACACAG |
| 7700 | RPL12 | CTGTTTCCTCTTCTGCAGTTA |
| 7710 | RPL12 | TAGTCTCCAAAAAAAGTTGGT |
| 7720 | RPL12 | TTTCTAGTCTCCAAAAAAAGT |
| 7730 | RPL12 | CCCCAGTATACCTGAGGTGCA |
| 7740 | CAPNS1 | AACCTGTTACCCACAGACCCT |
| 7750 | CAPNS1 | GCATTGACACATGTCGCAGCA |
| 7760 | CAPNS1 | AGGAATTCAAGTACTTGTGGA |
| 7770 | CAPNS1 | CAGTAGTGAACTCCCAGGTGC |
| 7780 | CAPNS1 | ATGTTGTTCCACAAGTACTTG |
| 7790 | CAPNS1 | TACACACCTGCCACCTTTTGA |
| 7800 | CAPNS1 | AGAGGTTTCTACACACCTGCC |
| 7810 | CAPNS1 | ATCTGAGTAGCGTCGGATGAT |
| 7820 | CAPNS1 | TCAAGAGATTTGAAGGCACCT |
| 7830 | CAPNS1 | TCCAGTGCCATCTTTGTCAAG |
| 7840 | RPL3 | CAGGGTGGCTTTGTCCACTAT |
| 7850 | RPS13 | TTTATTAGCTTACCTTTCTGT |
| 7860 | RPS13 | TTAGCTTACCTTTCTGTTCCT |
| 7870 | RPS13 | AGTGAATCATCTACAGCCTCT |
| 7880 | RPS13 | TTTTTCAGTGAATCATCTACA |
| 7890 | RPS13 | CCCTTTTTTCTTTTTCAGTGA |
| 7900 | RPS13 | AGGTGTAATCCTGAGAGATTC |
| 7910 | RPS13 | TATTCCATAACAGTGGTTGAA |
| 7920 | RPS21 | TCCACAGCTCCGCTAGCAATC |
| 7930 | RPS21 | TGACCCTTCTTCTCTTTCTAG |
| 7940 | RPS21 | TAGGTTGACAAGGTCACAGGC |
| 7950 | RPS21 | TTAAGGGTGAGTCAGATGATT |
| 7960 | RPS21 | CCCTGGTTCTAGGAACTTTTG |
| 7970 | RPS21 | AGACGATGCCATCGGCCTTGG |
| 7980 | SERF2 | ATTTTCTTTCCTTAGGCGGTA |
| 7990 | SERF2 | TTTCCTTAGGCGGTAACCAGC |
| 8000 | SERF2 | CTTAGGCGGTAACCAGCGTGA |
| 8010 | SERF2 | TGCTGCCGCCCGCAAGCAGAG |
| 8020 | SERF2 | ATATTCTTCTGGCGGGCGAGC |
| 8030 | SERF2 | CCTTAACCGAGTCGCTCTGCT |
| 8040 | SERF2 | CCTCCCCTCCCTGGGGCTACC |
| 8050 | RPL7A | TTTCCCCTCCTGCCTTTTAGG |
| 8060 | RPL7A | CCCTCCTGCCTTTTAGGGAAG |
| 8070 | RPL7A | GGGAAGACAAAGGCGCTTTGG |
| 8080 | RPL7A | TCTTTTCAGATCCGCCGTCAC |
| 8090 | RPL7A | AGATCCGCCGTCACTGGGGTG |
| 8100 | RPL7A | GGGCCAGGCTGTGTACTTACG |
| 8110 | RPL7A | GTGTAAAGCTGCCTCTTACCT |
| 8120 | HNRNPA2B1 | TAAATTACCTCCACCATATGG |
| 8130 | HNRNPA2B1 | CACTCTTCATTGGACCGTAGT |
| 8140 | HNRNPA2B1 | CAAAATCATTGTAATTTCCAC |
| 8150 | HNRNPA2B1 | TTACCTCCTCCATAGTTGTCA |
| 8160 | HNRNPA2B1 | CACCGCCACCACGTGAATCCC |
| 8170 | HNRNPA2B1 | GTGGTAGCAGGAACATGGGGG |
| 8180 | HNRNPA2B1 | GAAATTATAACCAGCAACCTT |
| 8190 | HNRNPA2B1 | ATAGGAAATTATGGAAGTGGA |
| 8200 | HNRNPA2B1 | GAGGTAGCCCCGGTTATGGAG |
| 8210 | HNRNPA2B1 | TAATAGGTGGCAATTTTGGAG |
| 8220 | HNRNPA2B1 | GGGATGGCTATAATGGGTATG |
| 8230 | HNRNPA2B1 | GCCCCTAACAGATGGATATGG |
| 8240 | HNRNPA2B1 | GGACCAGGACCAGGAAGTAAC |
| 8250 | HNRNPA2B1 | GGGATTCACGTGGTGGCGGTG |
| 8260 | HNRNPA2B1 | GCTTTGGGGATTCACGTGGTG |
| 8270 | HNRNPA2B1 | TTGTAGGCAACTTTGGCTTTG |
| 8280 | HNRNPA2B1 | TCTAGACAAGAAATGCAGGAA |
| 8290 | RPL13A | TCTAACAGAAAAAGCGGATGG |
| 8300 | RPL13A | GCATAGCTCACCTTGTCGTAG |
| 8310 | ENO1 | AGCAGGAGGCAGTTGCAGGAC |
| 8320 | ENO1 | TCCTTCCCAAGAATTGAAGAG |
| 8330 | ENO1 | CCTTTCTCCTTCCCAAGAATT |
| 8340 | ENO1 | TCCTAGATCAAGACTGGTGCC |
| 8350 | ENO1 | TTTTCTCCTAGATCAAGACTG |
| 8360 | ENO1 | CTTAGTGGTGTCTATCGAAGA |
| 8370 | PPIA | CTATATGTTGACAGGGTGGTG |
| 8380 | PPIA | AAGGTTGGATGGCAAGCATGT |
| 8390 | CD81 | CCTGTGAGGTGGCCGCCGGCA |
| 8400 | CD81 | ACCACCTCAGTGCTCAAGAAC |
| 8410 | CD81 | TGTCCCTCGGGCAGCAACATC |
| 8420 | RPL35 | TTGACAATGCGCCCCTCAGGC |
| 8430 | RPL35 | TAGCCGAGTCGTCCGGAAATC |
| 8440 | DAD1 | TTCTGTGGGTTGATCTGTATT |
| 8450 | DAD1 | CCAGCACCATCCTGCACCTTG |
| 8460 | DAD1 | TCTTTGCCAGCACCATCCTGC |
| 8470 | DAD1 | CTGATTTTCTCTTTGCCAGCA |
| 8480 | DAD1 | CAAGGCATCTCCCCAGAGCGA |
| 8490 | DAD1 | CCTGAGAATACAGATCAACCC |
| 8500 | DAD1 | CTTCTTGTGCAGTTTGCCTGA |
| 8510 | DAD1 | TGTTTTGCTTCTTGTGCAGTT |
| 8520 | DAD1 | TCTCGGGCTTCATCTCTTGTG |
| 8530 | DAD1 | GCGGTTCTTAGAAGAGTACTT |
| 8540 | UBA52 | TGAAGACCCTCACTGGCAAAA |
| 8550 | UBA52 | CCAGTGAGGGTCTTCACAAAG |
| 8560 | UBA52 | TGGGCAAGCTGGCGGAGAGAA |
| 8570 | UBA52 | ACCTTCTTCTTGGGACGCAGG |
| 8580 | RPL30 | TAGGTGAAAAGGTTTACTTTT |
| 8590 | RPL30 | TGATTTAAAAAGCATACCTGG |
| 8600 | RPL30 | AAAAGCATACCTGGATCAATG |
| 8610 | RPL30 | GGTGACTCTGACATCATTAGA |
| 8620 | RPL30 | TTTTTTAGGTGACTCTGACAT |
| 8630 | RPL30 | TTTTTATTTTTTAGGTGACTC |
| 8640 | RPL30 | GTTCCCAAAGGAAATCTGAAA |
| 8650 | RPL30 | CCCATTTTGGTTCCCAAAGGA |
| 8660 | RPL30 | TAGAAAAAGTCGCTGGAGTCG |
| 8670 | RPL30 | CTTTGTAGAAAAAGTCGCTGG |
| 8680 | RPL30 | ATGTTTGCTTTGTAGAAAAAG |
| 8690 | RNASEK | CGCCTGCCGCCCCCGGATGGG |
| 8700 | RNASEK | TCCCACCGCTTTCCGAGCCCG |
| 8710 | RNASEK | CGAGCCCGCTTGCACCTCGGC |
| 8720 | RNASEK | TGGCGTCGCTCCTGTGCTGTG |
| 8730 | RPL38 | TGTTGCAGCCTCGGAAAATTG |
| 8740 | RPL38 | TCTCTTTCCCTCTAGGTTTGG |
| 8750 | RPL38 | CCTCTAGGTTTGGCAGTGAAG |
| 8760 | RPL38 | GTCGGGCTGTGAGCAGGAAGT |
| 8770 | MYL12B | TTCTTTCTATTGTCTTCCAGG |
| 8780 | MYL12B | TATTGTCTTCCAGGCACCATT |
| 8790 | MYL12B | GCTAAAGTTCTTTCAGTCATC |
| 8800 | PFN1 | CCCATCAGCAGGACTAGCGCT |
| 8810 | PFN1 | CTCCTCCTCCAGCGCTAGTCC |
| 8820 | PFN1 | TCTTTCCTCCTCCTCCAGCGC |
| 8830 | PFN1 | GCATGGATCTTCGTACCAAGA |
| 8840 | RPS11 | TCCTCATAATCTGTAGACTGA |
| 8850 | RPS11 | TCTTTCCTATCCTTTCAGGCT |
| 8860 | RPS11 | CTATCCTTTCAGGCTATTGAG |
| 8870 | RPS11 | AGGCTATTGAGGGCACCTACA |
| 8880 | RPS11 | TTCTGAGGTTCCCCGCACCTC |

TABLE 14
Cas12b guide RNAs

| SEQ | | Target Domain Sequence | SEQ | | Target Domain Sequence |
|---|---|---|---|---|---|
| ID NO | Gene | (DNA) | ID NO | Gene | (DNA) |
| 8890 | GAPDH | CCCAGCTCTCATACCATGAGTCC | 9170 | E2F4 | CCAGAGTGCATGAGCTCGGAGCT |
| 8900 | TBP | TATCCACAGTGAATCTTGGTTGT | 9180 | E2F4 | TATCTACAACCTGGACGAGAGTG |
| 8910 | TBP | CACTTCGTGCCCGAAACGCCGAA | 9190 | E2F4 | CCTGGACTTCTGCACTGCCAGGG |
| 8920 | TBP | TCTCTGACCATTGTAGCGGTTTG | 9200 | E2F4 | CTGACAGCTCTTTGGGGAGTTCC |
| 8930 | TBP | TAGCGGTTTGCTGCGGTAATCAT | 9210 | G6PD | AGCTGGAGAAGCCCAAGCCCATC |
| 8940 | TBP | TCAGTTCTGGGAAAATGGTGTGC | 9220 | G6PD | TCACCCCACTGCTGCACCAGATT |
| 8950 | TBP | AGAATATGGTGGGGAGCTGTGAT | 9230 | KIF11 | ATGAAGATAAATTGATAGCACAA |
| 8960 | TBP | TCCTTCTAGTTATGAGCCAGAGT | 9240 | KIF11 | ATAGCACAAAATCTAGAACTTAA |
| 8970 | TBP | CCTGGTTTAATCTACAGAATGAT | 9250 | KIF11 | GTTTGACTAAGCTTAATTGCTTT |
| 8980 | TBP | TTCTCCTTATTTTTGTTTCTGGA | 9260 | KIF11 | CTTTCTGGAACAGGATCTGAAAC |
| 8990 | TBP | TTGTTTCTGGAAAAGTTGTATTA | 9270 | KIF11 | ATACCCATCAACACTGGTAAGAA |
| 9000 | TBP | ATGAAGCATTTGAAAACATCTAC | 9280 | KIF11 | TTCATCAATTGGCGGGGTTCCAT |
| 9010 | TBP | TAAAGGGATTCAGGAAGACGACG | 9290 | KIF11 | GCGGGGTTCCATTTTTCCAGGTA |
| 9020 | TBP | GGCGTTTCGGGCACGAAGTGCAA | 9300 | KIF11 | TCCCGCCTTAAATCCACAGCATA |
| 9030 | TBP | TATTCGGCGTTTCGGGCACGAAG | 9310 | KIF11 | ACACACTGGAGAGGTCTAAAGTG |
| 9040 | TBP | AAATAGATCTAACCTTGGGATTA | 9320 | KIF11 | CCTCTGCGAGCCCAGATCAACCT |
| 9050 | TBP | TCCCAGAACTGAAAATCAGTGCC | 9330 | KIF11 | AGTTCTAGATTTTGTGCTATCAA |
| 9060 | TBP | CTTACGGCTACCTCTTGGCTCCT | 9340 | KIF11 | TTATGGTTTCATTAAGTTCTAGA |
| 9070 | TBP | TCTTGCTGCCAGTCTGGACTGTT | 9350 | KIF11 | AGCTTAGTCAAACCAATTTTTAT |
| 9080 | TBP | TGAATCTTGAAGTCCAAGAACTT | 9360 | KIF11 | CTCTTTTAAAGTACCTGTTGGGA |
| 9090 | TBP | TTGGTGGGTGAGCACAAGGCCTT | 9370 | KIF11 | TATTTCTCTTTTAAAGTACCTGT |
| 9100 | TBP | CAGACTTACCTACTAAATTGTTG | 9380 | KIF11 | ACAGCTCAGGCTGTTTCCTTTTC |
| 9110 | TBP | AACCAGGAAATAACTCTGGCTCA | 9390 | KIF11 | TCTCTTCTTTGTTGTTTTCTGAA |
| 9120 | TBP | TGTAGATTAAACCAGGAAATAAC | 9400 | KIF11 | ACCGGAATTGTCTCTTCTTTGTT |
| 9130 | TBP | TGGGTTTGATCATTCTGTAGATT | 9410 | KIF11 | ATGAACAATCCACACCAGCATCT |
| 9140 | TBP | CTGCTCTGACTTTAGCACCTAAG | 9420 | KIF11 | AAGGTTGATCTGGGCTCGCAGAG |
| 9150 | TBP | CGTCGTCTTCCTGAATCCCTTTA | 9430 | KIF11 | CCAACCCCCAAGTGAATTAAAGG |
| 9160 | E2F4 | TAGTGAGTGGCGGCCCTGGGACT | — | — | — |

TABLE 15
Cas12e guide RNAs

| SEQ | | Target Domain Sequence | SEQ | | Target Domain Sequence |
|---|---|---|---|---|---|
| ID NO | Gene | (DNA) | ID NO | Gene | (DNA) |
| 9440 | GAPDH | TCTTCTAGGTATGACAACGAA | 9930 | E2F4 | CTGGACTTCTGCACTGCCAGG |
| 9450 | GAPDH | CCAGCTCTCATACCATGAGTC | 9940 | E2F4 | GACAGCTCTTTGGGGAGTTCC |
| 9460 | TBP | TGCCCGAAACGCCGAATATAA | 9950 | E2F4 | GAGGACATCAACTCCTCCAGC |
| 9470 | TBP | CTCTGACCATTGTAGCGGTTT | 9960 | E2F4 | AGGGCCACCCACCTTCTGAGG |
| 9480 | TBP | GTTCTGGGAAAATGGTGTGCA | 9970 | E2F4 | CTCTCGTCCAGGTIGTAGATA |
| 9490 | TBP | GGGAAAATGGTGTGCACAGGA | 9980 | G6PD | CCCACTTGTAGGTGCCCTCAT |
| 9500 | TBP | TTTCCCTAGTGAAGAACAGTC | 9990 | G6PD | TCAGCTCGTCTGCCTCCGTGG |
| 9510 | TBP | CTAGTGAAGAACAGTCCAGAC | 10000 | G6PD | TCACCTGCCATAAATATAGGG |
| 9520 | TBP | AGCTAAGTTCTTGGACTTCAA | 10010 | G6PD | CCAGCTCAATCTGGTGCAGCA |
| 9530 | TBP | TGGACTTCAAGATTCAGAATA | 10020 | G6PD | CTGTAGGGCACCTTGTATCTG |
| 9540 | TBP | AGATTCAGAATATGGTGGGGA | 10030 | G6PD | TGGTCATCATCTTGGTGTACA |
| 9550 | TBP | GAATATGGTGGGGAGCTGTGA | 10040 | G6PD | GGGCCTTGCCGCAGCGCAGGA |
| 9560 | TBP | TATAAGGTTAGAAGGCCTTGT | 10050 | G6PD | AGTATGAGGGCACCTACAAGT |
| 9570 | TBP | TTCTAGTTATGAGCCAGAGTT | 10060 | G6PD | CCCCACTGCTGCACCAGATTG |
| 9580 | TBP | AGTTATGAGCCAGAGTTATTT | 10070 | G6PD | GCGGGAGCCAGATGCACTTCG |
| 9590 | TBP | TGGTTTAATCTACAGAATGAT | 10080 | G6PD | ACCCCGAGGAGTCGGAGCTGG |
| 9600 | TBP | CCTTATTTTTGTTTCTGGAAA | 10090 | G6PD | TCAACCCCGAGGAGTCGGAGC |
| 9610 | TBP | GGAAAAGTTGTATTAACAGGT | 10100 | G6PD | ACCAGCAGTGCAAGCGCAACG |
| 9620 | TBP | TAGGTGCTAAAGTCAGAGCAG | 10110 | G6PD | ATGATGTGGCCGGCGACATCT |
| 9630 | TBP | AAAGGGATTCAGGAAGACGAC | 10120 | G6PD | TCCTGCGCTGCGGCAAGGCCC |
| 9640 | TBP | GGCACGAAGTGCAATGGTCTT | 10130 | G6PD | GCCACGTAGGGGTGCCCTTCA |
| 9650 | TBP | GCGTTTCGGGCACGAAGTGCA | 10140 | KIF11 | GGAACAGGATCTGAAACTGGA |
| 9660 | TBP | TGGCTCTCTTATCCTCATGAT | 10150 | KIF11 | GAAAACAACAAAGAAGAGACA |
| 9670 | TBP | CAGAACTGAAAATCAGTGCCG | 10160 | KIF11 | TCTTTTAGGATGTGGATGTAG |
| 9680 | TBP | TACGGCTACCTCTTGGCTCCT | 10170 | KIF11 | TTTAGGATGTGGATGTAGAAG |
| 9690 | TBP | TGCTGCCAGTCTGGACTGTTC | 10180 | KIF11 | GGGGCAGTATACTGAAGAACC |
| 9700 | TBP | GTACAACTCTAGCATATTTTC | 10190 | KIF11 | TCAATTGGCGGGGTTCCATTT |
| 9710 | TBP | GAATCTTGAAGTCCAAGAACT | 10200 | KIF11 | CGCCTTAAATCCACAGCATAA |
| 9720 | TBP | CATCACAGCTCCCCACCATAT | 10210 | KIF11 | AGATTTTGTGCTATCAATTTA |
| 9730 | TBP | AACCTTATAGGAAACTTCACA | 10220 | KIF11 | TTAAGTTCTAGATTTTGTGCT |
| 9740 | TBP | GACTTACCTACTAAATTGTTG | 10230 | KIF11 | AGAAAGCAATTAAGCTTAGTC |
| 9750 | TBP | GTAGATTAAACCAGGAAATAA | 10240 | KIF11 | GATCCTGTTCCAGAAAGCAAT |
| 9760 | TBP | GGGTTTGATCATTCTGTAGAT | 10250 | KIF11 | CTTTTAAAGTACCTGTTGGGA |
| 9770 | TBP | AGAAACAAAAATAAGGAGAAC | 10260 | KIF11 | ATTTCTCTTTTAAAGTACCTG |
| 9780 | TBP | TGTTACAACTTACCTGTTAAT | 10270 | KIF11 | TCTGTGGTGTCGTACCTTTAA |
| 9790 | TBP | GCTCTGACTTTAGCACCTAAG | 10280 | KIF11 | TACCAGTGTTGATGGGTATAA |
| 9800 | TBP | TAAATTTCTGCTCTGACTTTA | 10290 | KIF11 | GTTCTTACCAGTGTTGATGGG |
| 9810 | TBP | AATGCTTCATAAATTTCTGCT | 10300 | KIF11 | CGTGGTTCAGTTCTTACCAGT |
| 9820 | TBP | TGAATCCCTTTAGAATAGGGT | 10310 | KIF11 | GCTGATCAAGGAGATGTTCAC |
| 9830 | E2F4 | CTCCCACTGGGCCCAACAACA | 10320 | KIF11 | TTTTCAGCTGATCAAGGAGAT |
| 9840 | E2F4 | GCCCTGCTGGACAGCAGCAGC | 10330 | KIF11 | GAACAGTTTAGCATCATTAAC |
| 9850 | E2F4 | TCCGGACCCAACCCTTCTACC | 10340 | KIF11 | TTGTTGTTTTCTGAACAGTTT |
| 9860 | E2F4 | ACCTCCTTTGAGCCCATCAAG | 10350 | KIF11 | GTATACTGCCCCAGAACTGCC |
| 9870 | E2F4 | TGTTTTTCAGTTTTGGAACTC | 10360 | KIF11 | TCAGTATACTGCCCCAGAACT |
| 9880 | E2F4 | GTTTTGGAACTCCCCAAAGAG | 10370 | KIF11 | ATGTGATTTTTTATGCTGTGG |
| 9890 | E2F4 | CAGAGTGCATGAGCTCGGAGC | 10380 | KIF11 | TTGTCTTTTCCATGTGATTTT |
| 9900 | E2F4 | TCTTTCTCCACCCCCGGGAGA | 10390 | KIF11 | ACTTTAGACCTCTCCAGTGTG |
| 9910 | E2F4 | CCACCCCCGGGAGACCACGAT | 10400 | KIF11 | TCCACTTTAGACCTCTCCAGT |
| 9920 | E2F4 | GCACTGCCAGGGACAGCAGTG | — | — | — |

TABLE 16
Cas-Phi guide RNAs

| SEQ | | Target Domain Sequence | SEQ | | Target Domain Sequence |
|---|---|---|---|---|---|
| ID NO | Gene | (DNA) | ID NO | Gene | (DNA) |
| 10410 | GAPDH | TGCAGACCACAGTCCATGCCA | 11920 | E2F4 | ATGGGCTCAAAGGAGGTAGAA |
| 10420 | GAPDH | GCAGACCACAGTCCATGCCAT | 11930 | E2F4 | TGACAGCTCTTTGGGGAGTTC |
| 10430 | GAPDH | CAGACCACAGTCCATGCCATC | 11940 | E2F4 | CTGACAGCTCTTTGGGGAGIT |
| 10440 | GAPDH | TCATCTTCTAGGTATGACAAC | 11950 | E2F4 | TGAGGACATCAACTCCTCCAG |
| 10450 | GAPDH | CATCTTCTAGGTATGACAACG | 11960 | E2F4 | CAGGGCCACCCACCTTCTGAG |
| 10460 | GAPDH | ATCTTCTAGGTATGACAACGA | 11970 | E2F4 | TAGATATAATCGTGGTCTCCC |
| 10470 | GAPDH | TAGGTATGACAACGAATTTGG | 11980 | E2F4 | ACTCTCGTCCAGGTTGTAGAT |
| 10480 | GAPDH | CCCAGCTCTCATACCATGAGT | 11990 | G6PD | TGGGGGTTCACCCACTTGTAG |
| 10490 | TBP | TATCCACAGTGAATCTTGGTT | 12000 | G6PD | ACCCACTTGTAGGTGCCCTCA |
| 10500 | TBP | GTTGTAAACTTGACCTAAAGA | 12010 | G6PD | TAGGTGCCCTCATACTGGAAA |
| 10510 | TBP | TAAACTTGACCTAAAGACCAT | 12020 | G6PD | ATCAGCTCGTCTGCCTCCGTG |
| 10520 | TBP | ACCTAAAGACCATTGCACTTC | 12030 | G6PD | CCTCACCTGCCATAAATATAG |
| 10530 | TBP | CACTTCGTGCCCGAAACGCCG | 12040 | G6PD | CTCACCTGCCATAAATATAGG |
| 10540 | TBP | GTGCCCGAAACGCCGAATATA | 12050 | G6PD | GGCTTCTCCAGCTCAATCTGG |
| 10550 | TBP | TCTCTGACCATTGTAGCGGTT | 12060 | G6PD | TCCAGCTCAATCTGGTGCAGC |
| 10560 | TBP | TAGCGGTTTGCTGCGGTAATC | 12070 | G6PD | TCTGTAGGGCACCTTGTATCT |
| 10570 | TBP | GCTGCGGTAATCATGAGGATA | 12080 | G6PD | TATCTGTTGCCGTAGGTCAGG |
| 10580 | TBP | CTGCGGTAATCATGAGGATAA | 12090 | G6PD | CCGTAGGTCAGGTCCAGCTCC |
| 10590 | TBP | TCAGTTCTGGGAAAATGGTGT | 12100 | G6PD | AAGAACATGCCCGGCTTCTTG |
| 10600 | TBP | CAGTTCTGGGAAAATGGTGTG | 12110 | G6PD | TTGGTCATCATCTTGGTGTAC |
| 10610 | TBP | AGTTCTGGGAAAATGGTGTGC | 12120 | G6PD | GTCATCATCTTGGTGTACACG |
| 10620 | TBP | TGGGAAAATGGTGTGCACAGG | 12130 | G6PD | GTGTACACGGCCTCGTTGGGC |
| 10630 | TBP | TTTCCTTTCCCTAGTGAAGAA | 12140 | G6PD | GGCTGCACGCGGATCACCAGC |
| 10640 | TBP | TTCCTTTCCCTAGTGAAGAAC | 12150 | G6PD | CGCTTGCACTGCTGGTGGAAG |
| 10650 | TBP | TCCTTTCCCTAGTGAAGAACA | 12160 | G6PD | CACTGCTGGTGGAAGATGTCG |
| 10660 | TBP | CCTTTCCCTAGTGAAGAACAG | 12170 | G6PD | CGCTCGTTCAGGGCCTTGCCG |
| 10670 | TBP | CTTTCCCTAGTGAAGAACAGT | 12180 | G6PD | AGGGCCTTGCCGCAGCGCAGG |
| 10680 | TBP | CCCTAGTGAAGAACAGTCCAG | 12190 | G6PD | CCGCAGCGCAGGATGAAGGGC |
| 10690 | TBP | CCTAGTGAAGAACAGTCCAGA | 12200 | G6PD | CAGTATGAGGGCACCTACAAG |
| 10700 | TBP | TACAGAAGTTGGGTTTTCCAG | 12210 | G6PD | CCAGTATGAGGGCACCTACAA |
| 10710 | TBP | GGTTTTCCAGCTAAGTTCTTG | 12220 | G6PD | AGCTGGAGAAGCCCAAGCCCA |
| 10720 | TBP | TCCAGCTAAGTTCTTGGACTT | 12230 | G6PD | ACCCCACTGCTGCACCAGATT |
| 10730 | TBP | CCAGCTAAGTTCTTGGACTTC | 12240 | G6PD | CACCCCACTGCTGCACCAGAT |
| 10740 | TBP | CAGCTAAGTTCTTGGACTTCA | 12250 | G6PD | TCACCCCACTGCTGCACCAGA |
| 10750 | TBP | TTGGACTTCAAGATTCAGAAT | 12260 | G6PD | TGCGGGAGCCAGATGCACTTC |
| 10760 | TBP | GACTTCAAGATTCAGAATATG | 12270 | G6PD | AACCCCGAGGAGTCGGAGCTG |
| 10770 | TBP | AAGATTCAGAATATGGTGGGG | 12280 | G6PD | TTCAACCCCGAGGAGTCGGAG |
| 10780 | TBP | AGAATATGGTGGGGAGCTGTG | 12290 | G6PD | CACCAGCAGTGCAAGCGCAAC |
| 10790 | TBP | CCTATAAGGTTAGAAGGCCTT | 12300 | G6PD | CATGATGTGGCCGGCGACATC |
| 10800 | TBP | CTATAAGGTTAGAAGGCCTTG | 12310 | G6PD | ATCCTGCGCTGCGGCAAGGCC |
| 10810 | TBP | TGCTCACCCACCAACAATTTA | 12320 | G6PD | CGCCACGTAGGGGTGCCCTTC |
| 10820 | TBP | TTGCAATTTTCCTTCTAGTTA | 12330 | G6PD | CCGCCACGTAGGGGTGCCCTT |
| 10830 | TBP | TGCAATTTTCCTTCTAGTTAT | 12340 | KIF11 | ATGAAGATAAATTGATAGCAC |
| 10840 | TBP | GCAATTTTCCTTCTAGTTATG | 12350 | KIF11 | ATAGCACAAAATCTAGAACTT |
| 10850 | TBP | CAATTTTCCTTCTAGTTATGA | 12360 | KIF11 | ATGAAACCATAAAAATTGGTT |
| 10860 | TBP | TCCTTCTAGTTATGAGCCAGA | 12370 | KIF11 | GTTTGACTAAGCTTAATTGCT |
| 10870 | TBP | CCTTCTAGTTATGAGCCAGAG | 12380 | KIF11 | GACTAAGCTTAATTGCTTTCT |
| 10880 | TBP | CTTCTAGTTATGAGCCAGAGT | 12390 | KIF11 | ACTAAGCTTAATTGCTTTCTG |
| 10890 | TBP | TAGTTATGAGCCAGAGTTATT | 12400 | KIF11 | ATTGCTTTCTGGAACAGGATC |
| 10900 | TBP | TGAGCCAGAGTTATTTCCTGG | 12410 | KIF11 | CTTTCTGGAACAGGATCTGAA |
| 10910 | TBP | CCTGGTTTAATCTACAGAATG | 12420 | KIF11 | CTGGAACAGGATCTGAAACTG |
| 10920 | TBP | CTGGTTTAATCTACAGAATGA | 12430 | KIF11 | TGGAACAGGATCTGAAACTGG |
| 10930 | TBP | AATCTACAGAATGATCAAACC | 12440 | KIF11 | TCTAATGTCCGTTAAAGGTAC |
| 10940 | TBP | ATCTACAGAATGATCAAACCC | 12450 | KIF11 | AAGGTACGACACCACAGAGGA |
| 10950 | TBP | TTCTCCTTATTTTTGTTTCTG | 12460 | KIF11 | TTTATACCCATCAACACTGGT |
| 10960 | TBP | TCCTTATTTTTGTTTCTGGAA | 12470 | KIF11 | ATACCCATCAACACTGGTAAG |
| 10970 | TBP | TTTTTGTTTCTGGAAAAGTTG | 12480 | KIF11 | TACCCATCAACACTGGTAAGA |
| 10980 | TBP | TTGTTTCTGGAAAAGTTGTAT | 12490 | KIF11 | ATCAGCTGAAAAGGAAACAGC |
| 10990 | TBP | TGTTTCTGGAAAAGTTGTATT | 12500 | KIF11 | ATGATGCTAAACTGTTCAGAA |
| 11000 | TBP | GTTTCTGGAAAAGTTGTATTA | 12510 | KIF11 | AGAAAACAACAAAGAAGAGAC |
| 11010 | TBP | TTTCTGGAAAAGTTGTATTAA | 12520 | KIF11 | CTTCTTTTAGGATGTGGATGT |
| 11020 | TBP | CTGGAAAAGTTGTATTAACAG | 12530 | KIF11 | TTCTTTTAGGATGTGGATGTA |
| 11030 | TBP | TGGAAAAGTTGTATTAACAGG | 12540 | KIF11 | TTTTAGGATGTGGATGTAGAA |
| 11040 | TBP | TCTTCTTAGGTGCTAAAGTCA | 12550 | KIF11 | TAGGATGTGGATGTAGAAGAG |
| 11050 | TBP | TTAGGTGCTAAAGTCAGAGCA | 12560 | KIF11 | AGGATGTGGATGTAGAAGAGG |
| 11060 | TBP | GGTGCTAAAGTCAGAGCAGAA | 12570 | KIF11 | GGATGTGGATGTAGAAGAGGC |
| 11070 | TBP | TAAAGGGATTCAGGAAGACGA | 12580 | KIF11 | TGGGGCAGTATACTGAAGAAC |
| 11080 | TBP | GGTCAAGTTTACAACCAAGAT | 12590 | KIF11 | TTCATCAATTGGCGGGGTTCC |
| 11090 | TBP | AGGTCAAGTTTACAACCAAGA | 12600 | KIF11 | ATCAATTGGCGGGGTTCCATT |
| 11100 | TBP | GGGCACGAAGTGCAATGGTCT | 12610 | KIF11 | GCGGGGTTCCATTTTTCCAGG |
| 11110 | TBP | CGGGCACGAAGTGCAATGGTC | 12620 | KIF11 | TCCCGCCTTAAATCCACAGCA |
| 11120 | TBP | GGCGTTTCGGGCACGAAGTGC | 12630 | KIF11 | CCCGCCTTAAATCCACAGCAT |
| 11130 | TBP | TATTCGGCGTTTCGGGCACGA | 12640 | KIF11 | CCGCCTTAAATCCACAGCATA |
| 11140 | TBP | GGATTATATTCGGCGTTTCGG | 12650 | KIF11 | AATCCACAGCATAAAAAATCA |
| 11150 | TBP | AAATAGATCTAACCTTGGGAT | 12660 | KIF11 | ACACACTGGAGAGGTCTAAAG |
| 11160 | TBP | TCCTCATGATTACCGCAGCAA | 12670 | KIF11 | GTTACAAAGAGCAGATTACCT |
| 11170 | TBP | GTGGCTCTCTTATCCTCATGA | 12680 | KIF11 | CAAAGAGCAGATTACCTCTGC |
| 11180 | TBP | CCAGAACTGAAAATCAGTGCC | 12690 | KIF11 | CCTCTGCGAGCCCAGATCAAC |
| 11190 | TBP | CCCAGAACTGAAAATCAGTGC | 12700 | KIF11 | TAGATTTTGTGCTATCAATTT |
| 11200 | TBP | TCCCAGAACTGAAAATCAGTG | 12710 | KIF11 | AGTTCTAGATTTTGTGCTATC |
| 11210 | TBP | GCTCCTGTGCACACCATTTTC | 12720 | KIF11 | ATTAAGTTCTAGATTTTGTGC |
| 11220 | TBP | CGGCTACCTCTTGGCTCCTGT | 12730 | KIF11 | CATTAAGTTCTAGATTTTGTG |
| 11230 | TBP | TTACGGCTACCTCTTGGCTCC | 12740 | KIF11 | TGGTTTCATTAAGTTCTAGAT |
| 11240 | TBP | CTTACGGCTACCTCTTGGCTC | 12750 | KIF11 | ATGGTTTCATTAAGTTCTAGA |
| 11250 | TBP | CTGCCAGTCTGGACTGTTCTT | 12760 | KIF11 | TATGGTTTCATTAAGTTCTAG |
| 11260 | TBP | TTGCTGCCAGTCTGGACTGTT | 12770 | KIF11 | TTATGGTTTCATTAAGTTCTA |
| 11270 | TBP | CTTGCTGCCAGTCTGGACTGT | 12780 | KIF11 | GTCAAACCAATTTTTATGGTT |
| 11280 | TBP | TCTTGCTGCCAGTCTGGACTG | 12790 | KIF11 | AGCTTAGTCAAACCAATTTTT |
| 11290 | TBP | TGTACAACTCTAGCATATTTT | 12800 | KIF11 | CAGAAAGCAATTAAGCTTAGT |
| 11300 | TBP | GCTGGAAAACCCAACTTCTGT | 12810 | KIF11 | AGATCCTGTTCCAGAAAGCAA |
| 11310 | TBP | AAGTCCAAGAACTTAGCTGGA | 12820 | KIF11 | CAGATCCTGTTCCAGAAAGCA |
| 11320 | TBP | TGAATCTTGAAGTCCAAGAAC | 12830 | KIF11 | GGATATCCAGTTTCAGATCCT |
| 11330 | TBP | ACATCACAGCTCCCCACCATA | 12840 | KIF11 | AAGTACCTGTTGGGATATCCA |
| 11340 | TBP | TAACCTTATAGGAAACTTCAC | 12850 | KIF11 | AAAGTACCTGTTGGGATATCC |
| 11350 | TBP | GTGGGTGAGCACAAGGCCTTC | 12860 | KIF11 | TAAAGTACCTGTTGGGATATC |
| 11360 | TBP | TTGGTGGGTGAGCACAAGGCC | 12870 | KIF11 | TCTTTTAAAGTACCTGTTGGG |
| 11370 | TBP | CCTACTAAATTGTTGGTGGGT | 12880 | KIF11 | CTCTTTTAAAGTACCTGTTGG |
| 11380 | TBP | AGACTTACCTACTAAATTGTT | 12890 | KIF11 | TATTTCTCTTTTAAAGTACCT |
| 11390 | TBP | CAGACTTACCTACTAAATTGT | 12900 | KIF11 | CTCTGTGGTGTCGTACCTTTA |
| 11400 | TBP | AACCAGGAAATAACTCTGGCT | 12910 | KIF11 | CCTCTGTGGTGTCGTACCTTT |
| 11410 | TBP | TGTAGATTAAACCAGGAAATA | 12920 | KIF11 | TCCTCTGTGGTGTCGTACCTT |
| 11420 | TBP | ATCATTCTGTAGATTAAACCA | 12930 | KIF11 | ATGGGTATAAATAACTTTTCC |
| 11430 | TBP | GATCATTCTGTAGATTAAACC | 12940 | KIF11 | CCAGTGTTGATGGGTATAAAT |
| 11440 | TBP | TGGGTTTGATCATTCTGTAGA | 12950 | KIF11 | TTACCAGTGTTGATGGGTATA |
| 11450 | TBP | CAGAAACAAAAATAAGGAGAA | 12960 | KIF11 | AGTTCTTACCAGIGTTGATGG |
| 11460 | TBP | CCAGAAACAAAAATAAGGAGA | 12970 | KIF11 | ACGTGGTTCAGTTCTTACCAG |
| 11470 | TBP | TCCAGAAACAAAAATAAGGAG | 12980 | KIF11 | AGCTGATCAAGGAGATGTTCA |
| 11480 | TBP | ATACAACTTTTCCAGAAACAA | 12990 | KIF11 | CAGCTGATCAAGGAGATGTTC |
| 11490 | TBP | CCTGTTAATACAACTTTTCCA | 13000 | KIF11 | TCAGCTGATCAAGGAGATGTT |
| 11500 | TBP | CAACTTACCTGTTAATACAAC | 13010 | KIF11 | CTTTTCAGCTGATCAAGGAGA |
| 11510 | TBP | CTGTTACAACTTACCTGTTAA | 13020 | KIF11 | CCTTTTCAGCTGATCAAGGAG |
| 11520 | TBP | TGCTCTGACTTTAGCACCTAA | 13030 | KIF11 | ACAGCTCAGGCTGTTTCCTTT |
| 11530 | TBP | CTGCTCTGACTTTAGCACCTA | 13040 | KIF11 | GCATCATTAACAGCTCAGGCT |
| 11540 | TBP | ATAAATTTCTGCTCTGACTTT | 13050 | KIF11 | AGCATCATTAACAGCTCAGGC |
| 11550 | TBP | AAATGCTTCATAAATTTCTGC | 13060 | KIF11 | TGAACAGTTTAGCATCATTAA |
| 11560 | TBP | CAAATGCTTCATAAATTTCTG | 13070 | KIF11 | CTGAACAGTTTAGCATCATTA |
| 11570 | TBP | TCAAATGCTTCATAAATTTCT | 13080 | KIF11 | TCTGAACAGTTTAGCATCATT |
| 11580 | TBP | CTGAATCCCTTTAGAATAGGG | 13090 | KIF11 | TTTTCTGAACAGTTTAGCATC |
| 11590 | TBP | CGTCGTCTTCCTGAATCCCTT | 13100 | KIF11 | TTGTTTTCTGAACAGTTTAGC |
| 11600 | E2F4 | GGGGGCTATCATTGTAGTGAG | 13110 | KIF11 | TTTGTTGTTTTCTGAACAGTT |
| 11610 | E2F4 | GGGGCTATCATTGTAGTGAGT | 13120 | KIF11 | TCTCTTCTTTGTTGTTTTCTG |
| 11620 | E2F4 | TAGTGAGTGGCGGCCCTGGGA | 13130 | KIF11 | CCGGAATTGTCTCTTCTTTGT |
| 11630 | E2F4 | ACTCCCACTGGGCCCAACAAC | 13140 | KIF11 | ACCGGAATTGTCTCTTCTTTG |
| 11640 | E2F4 | TGCCCTGCTGGACAGCAGCAG | 13150 | KIF11 | AATTTACCGGAATTGTCTCTT |
| 11650 | E2F4 | GTCCGGACCCAACCCTTCTAC | 13160 | KIF11 | AAATTTACCGGAATTGTCTCT |
| 11660 | E2F4 | TACCTCCTTTGAGCCCATCAA | 13170 | KIF11 | AGTATACTGCCCCAGAACTGC |
| 11670 | E2F4 | GAGCCCATCAAGGCAGACCCC | 13180 | KIF11 | TTCAGTATACTGCCCCAGAAC |
| 11680 | E2F4 | AGCCCATCAAGGCAGACCCCA | 13190 | KIF11 | GAGGTTCTTCAGTATACTGCC |
| 11690 | E2F4 | CTTGTTTTTCAGTTTTGGAAC | 13200 | KIF11 | ACTTAGAGGTTCTTCAGTATA |
| 11700 | E2F4 | TTTTTCAGTTTTGGAACTCCC | 13210 | KIF11 | ATGAACAATCCACACCAGCAT |
| 11710 | E2F4 | TTCAGTTTTGGAACTCCCCAA | 13220 | KIF11 | TCTGATATGACATACCTGGAA |
| 11720 | E2F4 | TCAGTTTTGGAACTCCCCAAA | 13230 | KIF11 | CATGTGATTTTTTATGCTGTG |
| 11730 | E2F4 | CAGTTTTGGAACTCCCCAAAG | 13240 | KIF11 | CCATGTGATTTTTTATGCTGT |
| 11740 | E2F4 | AGTTTTGGAACTCCCCAAAGA | 13250 | KIF11 | TCCATGTGATTTTTTATGCTG |
| 11750 | E2F4 | TGGAACTCCCCAAAGAGCTGT | 13260 | KIF11 | TCTTTTCCATGTGATTTTTTA |
| 11760 | E2F4 | GGAACTCCCCAAAGAGCTGTC | 13270 | KIF11 | GTCTTTTCCATGTGATTTTTT |
| 11770 | E2F4 | CCAGAGTGCATGAGCTCGGAG | 13280 | KIF11 | TTTGTCTTTTCCATGTGATTT |
| 11780 | E2F4 | GCCCCTCTGCTTCGTCTTTCT | 13290 | KIF11 | CTTTGTCTTTTCCATGTGATT |
| 11790 | E2F4 | CCCCTCTGCTTCGTCTTTCTC | 13300 | KIF11 | TCTTTGTCTTTTCCATGTGAT |
| 11800 | E2F4 | GTCTTTCTCCACCCCCGGGAG | 13310 | KIF11 | ATGCCTCTGTTTTCTTTGTCT |
| 11810 | E2F4 | CTCCACCCCCGGGAGACCACG | 13320 | KIF11 | GACCTCTCCAGTGTGTTAATG |
| 11820 | E2F4 | TCCACCCCCGGGAGACCACGA | 13330 | KIF11 | AGACCTCTCCAGTGTGTTAAT |
| 11830 | E2F4 | TATCTACAACCTGGACGAGAG | 13340 | KIF11 | CACTTTAGACCTCTCCAGTGT |
| 11840 | E2F4 | GATGTGCCTGTTCTCAACCTC | 13350 | KIF11 | TTCCACTTTAGACCTCTCCAG |
| 11850 | E2F4 | ATGTGCCTGTTCTCAACCTCT | 13360 | KIF11 | CTTCCACTTTAGACCTCTCCA |
| 11860 | E2F4 | TGCACTGCCAGGGACAGCAGT | 13370 | KIF11 | TAACCAAGTGCTCTGTAGTTT |
| 11870 | E2F4 | CCTGGACTTCTGCACTGCCAG | 13380 | KIF11 | GTAACCAAGTGCTCTGTAGTT |
| 11880 | E2F4 | CTATCAGTCCCAGGGCCGCCA | 13390 | KIF11 | ATCTGGGCTCGCAGAGGTAAT |
| 11890 | E2F4 | GGCCCAGTGGGAGTGAACTGA | 13400 | KIF11 | AAGGTTGATCTGGGCTCGCAG |
| 11900 | E2F4 | TTGGGCCCAGTGGGAGTGAAC | 13410 | KIF11 | CCAACCCCCAAGTGAATTAAA |
| 11910 | E2F4 | GGTCCGGACGAACTGCTGCTG | — | — | — |

TABLE 17
Mad7 guide RNAs

| SEQ | | Target Domain Sequence | SEQ | | Target Domain Sequence |
|---|---|---|---|---|---|
| ID NO | Gene | (DNA) | ID NO | Gene | (DNA) |
| 13420 | GAPDH | TGCAGACCACAGTCCATGCCA | 14890 | E2F4 | TTGGGCCCAGTGGGAGTGAAC |
| 13430 | GAPDH | GCAGACCACAGTCCATGCCAT | 14900 | E2F4 | GGTCCGGACGAACTGCTGCTG |
| 13440 | GAPDH | CAGACCACAGTCCATGCCATC | 14910 | E2F4 | ATGGGCTCAAAGGAGGTAGAA |
| 13450 | GAPDH | TCATCTTCTAGGTATGACAAC | 14920 | E2F4 | TGACAGCTCTTTGGGGAGTTC |
| 13460 | GAPDH | CATCTTCTAGGTATGACAACG | 14930 | E2F4 | CTGACAGCTCTTTGGGGAGTT |
| 13470 | GAPDH | ATCTTCTAGGTATGACAACGA | 14940 | E2F4 | TGAGGACATCAACTCCTCCAG |
| 13480 | GAPDH | TAGGTATGACAACGAATTTGG | 14950 | E2F4 | CAGGGCCACCCACCTTCTGAG |
| 13490 | GAPDH | CCCAGCTCTCATACCATGAGT | 14960 | E2F4 | TAGATATAATCGTGGTCTCCC |
| 13500 | TBP | TATCCACAGTGAATCTTGGTT | 14970 | E2F4 | ACTCTCGTCCAGGTTGTAGAT |
| 13510 | TBP | GTTGTAAACTTGACCTAAAGA | 14980 | G6PD | TGGGGGTTCACCCACTTGTAG |
| 13520 | TBP | TAAACTTGACCTAAAGACCAT | 14990 | G6PD | ACCCACTTGTAGGTGCCCTCA |
| 13530 | TBP | ACCTAAAGACCATTGCACTTC | 15000 | G6PD | TAGGTGCCCTCATACTGGAAA |
| 13540 | TBP | CACTTCGTGCCCGAAACGCCG | 15010 | G6PD | ATCAGCTCGTCTGCCTCCGTG |
| 13550 | TBP | GTGCCCGAAACGCCGAATATA | 15020 | G6PD | CCTCACCTGCCATAAATATAG |
| 13560 | TBP | TCTCTGACCATTGTAGCGGTT | 15030 | G6PD | CTCACCTGCCATAAATATAGG |
| 13570 | TBP | TAGCGGTTTGCTGCGGTAATC | 15040 | G6PD | GGCTTCTCCAGCTCAATCTGG |
| 13580 | TBP | GCTGCGGTAATCATGAGGATA | 15050 | G6PD | TCCAGCTCAATCTGGTGCAGC |
| 13590 | TBP | CTGCGGTAATCATGAGGATAA | 15060 | G6PD | TCTGTAGGGCACCTTGTATCT |
| 13600 | TBP | TCAGTTCTGGGAAAATGGTGT | 15070 | G6PD | TATCTGTTGCCGTAGGTCAGG |
| 13610 | TBP | CAGTTCTGGGAAAATGGTGTG | 15080 | G6PD | CCGTAGGTCAGGICCAGCTCC |
| 13620 | TBP | AGTTCTGGGAAAATGGTGTGC | 15090 | G6PD | AAGAACATGCCCGGCTTCTTG |
| 13630 | TBP | TGGGAAAATGGTGTGCACAGG | 15100 | G6PD | TTGGTCATCATCTTGGTGTAC |
| 13640 | TBP | TTTCCTTTCCCTAGTGAAGAA | 15110 | G6PD | GTCATCATCTTGGTGTACACG |
| 13650 | TBP | TTCCTTTCCCTAGTGAAGAAC | 15120 | G6PD | GTGTACACGGCCTCGTTGGGC |
| 13660 | TBP | TCCTTTCCCTAGTGAAGAACA | 15130 | G6PD | GGCTGCACGCGGATCACCAGC |
| 13670 | TBP | CCTTTCCCTAGTGAAGAACAG | 15140 | G6PD | CGCTTGCACTGCTGGTGGAAG |
| 13680 | TBP | CTTTCCCTAGTGAAGAACAGT | 15150 | G6PD | CACTGCTGGTGGAAGATGTCG |
| 13690 | TBP | CCCTAGTGAAGAACAGTCCAG | 15160 | G6PD | CGCTCGTTCAGGGCCTTGCCG |
| 13700 | TBP | CCTAGTGAAGAACAGTCCAGA | 15170 | G6PD | AGGGCCTTGCCGCAGCGCAGG |
| 13710 | TBP | TACAGAAGTTGGGTTTTCCAG | 15180 | G6PD | CCGCAGCGCAGGATGAAGGGC |
| 13720 | TBP | GGTTTTCCAGCTAAGTTCTTG | 15190 | G6PD | CAGTATGAGGGCACCTACAAG |
| 13730 | TBP | TCCAGCTAAGTTCTTGGACTT | 15200 | G6PD | CCAGTATGAGGGCACCTACAA |
| 13740 | TBP | CCAGCTAAGTTCTTGGACTTC | 15210 | G6PD | AGCTGGAGAAGCCCAAGCCCA |
| 13750 | TBP | CAGCTAAGTTCTTGGACTTCA | 15220 | G6PD | ACCCCACTGCTGCACCAGATT |
| 13760 | TBP | TTGGACTTCAAGATTCAGAAT | 15230 | G6PD | CACCCCACTGCTGCACCAGAT |
| 13770 | TBP | GACTTCAAGATTCAGAATATG | 15240 | G6PD | TCACCCCACTGCTGCACCAGA |
| 13780 | TBP | AAGATTCAGAATATGGTGGGG | 15250 | G6PD | TGCGGGAGCCAGATGCACTTC |
| 13790 | TBP | AGAATATGGTGGGGAGCTGTG | 15260 | G6PD | AACCCCGAGGAGTCGGAGCTG |
| 13800 | TBP | CCTATAAGGTTAGAAGGCCTT | 15270 | G6PD | TTCAACCCCGAGGAGTCGGAG |
| 13810 | TBP | CTATAAGGTTAGAAGGCCTTG | 15280 | G6PD | CACCAGCAGTGCAAGCGCAAC |
| 13820 | TBP | TGCTCACCCACCAACAATTTA | 15290 | G6PD | CATGATGTGGCCGGCGACATC |
| 13830 | TBP | TTGCAATTTTCCTTCTAGTTA | 15300 | G6PD | ATCCTGCGCTGCGGCAAGGCC |
| 13840 | TBP | TGCAATTTTCCTTCTAGTTAT | 15310 | G6PD | CGCCACGTAGGGGTGCCCTTC |
| 13850 | TBP | GCAATTTTCCTTCTAGTTATG | 15320 | G6PD | CCGCCACGTAGGGGTGCCCTT |
| 13860 | TBP | CAATTTTCCTTCTAGTTATGA | 15330 | KIF11 | ATGAAGATAAATTGATAGCAC |
| 13870 | TBP | TCCTTCTAGTTATGAGCCAGA | 15340 | KIF11 | ATAGCACAAAATCTAGAACTT |
| 13880 | TBP | CCTTCTAGTTATGAGCCAGAG | 15350 | KIF11 | ATGAAACCATAAAAATTGGTT |
| 13890 | TBP | CTTCTAGTTATGAGCCAGAGT | 15360 | KIF11 | GTTTGACTAAGCTTAATTGCT |
| 13900 | TBP | TAGTTATGAGCCAGAGTTATT | 15370 | KIF11 | GACTAAGCTTAATTGCTTTCT |
| 13910 | TBP | TGAGCCAGAGTTATTTCCTGG | 15380 | KIF11 | ACTAAGCTTAATTGCTTTCTG |
| 13920 | TBP | CCTGGTTTAATCTACAGAATG | 15390 | KIF11 | ATTGCTTTCTGGAACAGGATC |
| 13930 | TBP | CTGGTTTAATCTACAGAATGA | 15400 | KIF11 | CTTTCTGGAACAGGATCTGAA |
| 13940 | TBP | AATCTACAGAATGATCAAACC | 15410 | KIF11 | CTGGAACAGGATCTGAAACTG |
| 13950 | TBP | ATCTACAGAATGATCAAACCC | 15420 | KIF11 | TGGAACAGGATCTGAAACTGG |
| 13960 | TBP | TTCTCCTTATTTTTGTTTCTG | 15430 | KIF11 | TCTAATGTCCGTTAAAGGTAC |
| 13970 | TBP | TCCTTATTTTTGTTTCTGGAA | 15440 | KIF11 | AAGGTACGACACCACAGAGGA |
| 13980 | TBP | TTTTTGTTTCTGGAAAAGTTG | 15450 | KIF11 | TTTATACCCATCAACACTGGT |
| 13990 | TBP | TTGTTTCTGGAAAAGTTGTAT | 15460 | KIF11 | ATACCCATCAACACTGGTAAG |
| 14000 | TBP | TGTTTCTGGAAAAGTTGTATT | 15470 | KIF11 | TACCCATCAACACTGGTAAGA |
| 14010 | TBP | GTTTCTGGAAAAGTTGTATTA | 15480 | KIF11 | ATCAGCTGAAAAGGAAACAGC |
| 14020 | TBP | TTTCTGGAAAAGTTGTATTAA | 15490 | KIF11 | ATGATGCTAAACTGTTCAGAA |
| 14030 | TBP | CTGGAAAAGTTGTATTAACAG | 15500 | KIF11 | AGAAAACAACAAAGAAGAGAC |
| 14040 | TBP | TGGAAAAGTTGTATTAACAGG | 15510 | KIF11 | CTTCTTTTAGGATGTGGATGT |
| 14050 | TBP | TCTTCTTAGGTGCTAAAGTCA | 15520 | KIF11 | TTCTTTTAGGATGTGGATGTA |
| 14060 | TBP | TTAGGTGCTAAAGTCAGAGCA | 15530 | KIF11 | TTTTAGGATGTGGATGTAGAA |
| 14070 | TBP | GGTGCTAAAGTCAGAGCAGAA | 15540 | KIF11 | TAGGATGTGGATGTAGAAGAG |
| 14080 | TBP | TAAAGGGATTCAGGAAGACGA | 15550 | KIF11 | AGGATGTGGATGTAGAAGAGG |
| 14090 | TBP | GGTCAAGTTTACAACCAAGAT | 15560 | KIF11 | GGATGTGGATGTAGAAGAGGC |
| 14100 | TBP | AGGTCAAGTTTACAACCAAGA | 15570 | KIF11 | TGGGGCAGTATACTGAAGAAC |
| 14110 | TBP | GGGCACGAAGTGCAATGGTCT | 15580 | KIF11 | TTCATCAATTGGCGGGGTTCC |
| 14120 | TBP | CGGGCACGAAGTGCAATGGTC | 15590 | KIF11 | ATCAATTGGCGGGGTTCCATT |
| 14130 | TBP | GGCGTTTCGGGCACGAAGTGC | 15600 | KIF11 | GCGGGGTTCCATTTTTCCAGG |
| 14140 | TBP | TATTCGGCGTTTCGGGCACGA | 15610 | KIF11 | TCCCGCCTTAAATCCACAGCA |
| 14150 | TBP | GGATTATATTCGGCGTTTCGG | 15620 | KIF11 | CCCGCCTTAAATCCACAGCAT |
| 14160 | TBP | AAATAGATCTAACCTTGGGAT | 15630 | KIF11 | CCGCCTTAAATCCACAGCATA |
| 14170 | TBP | TCCTCATGATTACCGCAGCAA | 15640 | KIF11 | AATCCACAGCATAAAAAATCA |
| 14180 | TBP | GTGGCTCTCTTATCCTCATGA | 15650 | KIF11 | ACACACTGGAGAGGTCTAAAG |
| 14190 | TBP | CCAGAACTGAAAATCAGTGCC | 15660 | KIF11 | GTTACAAAGAGCAGATTACCT |
| 14200 | TBP | CCCAGAACTGAAAATCAGTGC | 15670 | KIF11 | CAAAGAGCAGATTACCTCTGC |
| 14210 | TBP | TCCCAGAACTGAAAATCAGTG | 15680 | KIF11 | CCTCTGCGAGCCCAGATCAAC |
| 14220 | TBP | GCTCCTGTGCACACCATTTTC | 15690 | KIF11 | TAGATTTTGTGCTATCAATTT |
| 14230 | TBP | CGGCTACCTCTTGGCTCCTGT | 15700 | KIF11 | AGTTCTAGATTTTGTGCTATC |
| 14240 | TBP | TTACGGCTACCTCTTGGCTCC | 15710 | KIF11 | ATTAAGTTCTAGATTTTGTGC |
| 14250 | TBP | CTTACGGCTACCTCTTGGCTC | 15720 | KIF11 | CATTAAGTTCTAGATTTTGTG |
| 14260 | TBP | CTGCCAGTCTGGACTGTTCTT | 15730 | KIF11 | TGGTTTCATTAAGTTCTAGAT |
| 14270 | TBP | TTGCTGCCAGTCTGGACTGTT | 15740 | KIF11 | ATGGTTTCATTAAGTTCTAGA |
| 14280 | TBP | CTTGCTGCCAGTCTGGACTGT | 15750 | KIF11 | TATGGTTTCATTAAGTTCTAG |
| 14290 | TBP | TCTTGCTGCCAGTCTGGACTG | 15760 | KIF11 | TTATGGTTTCATTAAGTTCTA |
| 14300 | TBP | TGTACAACTCTAGCATATTTT | 15770 | KIF11 | GTCAAACCAATTTTTATGGTT |
| 14310 | TBP | GCTGGAAAACCCAACTTCTGT | 15780 | KIF11 | AGCTTAGTCAAACCAATTTTT |
| 14320 | TBP | AAGTCCAAGAACTTAGCTGGA | 15790 | KIF11 | CAGAAAGCAATTAAGCTTAGT |
| 14330 | TBP | TGAATCTTGAAGTCCAAGAAC | 15800 | KIF11 | AGATCCTGTTCCAGAAAGCAA |
| 14340 | TBP | ACATCACAGCTCCCCACCATA | 15810 | KIF11 | CAGATCCTGTTCCAGAAAGCA |
| 14350 | TBP | TAACCTTATAGGAAACTTCAC | 15820 | KIF11 | GGATATCCAGTTTCAGATCCT |
| 14360 | TBP | GTGGGTGAGCACAAGGCCTTC | 15830 | KIF11 | AAGTACCTGTTGGGATATCCA |
| 14370 | TBP | TTGGTGGGTGAGCACAAGGCC | 15840 | KIF11 | AAAGTACCTGTTGGGATATCC |
| 14380 | TBP | CCTACTAAATTGTTGGTGGGT | 15850 | KIF11 | TAAAGTACCTGTTGGGATATC |
| 14390 | TBP | AGACTTACCTACTAAATTGTT | 15860 | KIF11 | TCTTTTAAAGTACCTGTTGGG |
| 14400 | TBP | CAGACTTACCTACTAAATTGT | 15870 | KIF11 | CTCTTTTAAAGTACCTGTTGG |
| 14410 | TBP | AACCAGGAAATAACTCTGGCT | 15880 | KIF11 | TATTTCTCTTTTAAAGTACCT |
| 14420 | TBP | TGTAGATTAAACCAGGAAATA | 15890 | KIF11 | ATGGGTATAAATAACTTTTCC |
| 14430 | TBP | ATCATTCTGTAGATTAAACCA | 15900 | KIF11 | CCAGTGTTGATGGGTATAAAT |
| 14440 | TBP | GATCATTCTGTAGATTAAACC | 15910 | KIF11 | TTACCAGTGTTGATGGGTATA |
| 14450 | TBP | TGGGTTTGATCATTCTGTAGA | 15920 | KIF11 | AGTTCTTACCAGTGTTGATGG |
| 14460 | TBP | CAGAAACAAAAATAAGGAGAA | 15930 | KIF11 | ACGTGGTTCAGTTCTTACCAG |
| 14470 | TBP | CCAGAAACAAAAATAAGGAGA | 15940 | KIF11 | AGCTGATCAAGGAGATGTTCA |
| 14480 | TBP | TCCAGAAACAAAAATAAGGAG | 15950 | KIF11 | CAGCTGATCAAGGAGATGTTC |
| 14490 | TBP | ATACAACTTTTCCAGAAACAA | 15960 | KIF11 | TCAGCTGATCAAGGAGATGTT |
| 14500 | TBP | CCTGTTAATACAACTTTTCCA | 15970 | KIF11 | CTTTTCAGCTGATCAAGGAGA |
| 14510 | TBP | CAACTTACCTGTTAATACAAC | 15980 | KIF11 | CCTTTTCAGCTGATCAAGGAG |
| 14520 | TBP | CTGTTACAACTTACCTGTTAA | 15990 | KIF11 | ACAGCTCAGGCTGTTTCCTTT |
| 14530 | TBP | ATAAATTTCTGCTCTGACTTT | 16000 | KIF11 | GCATCATTAACAGCTCAGGCT |
| 14540 | TBP | AAATGCTTCATAAATTTCTGC | 16010 | KIF11 | AGCATCATTAACAGCTCAGGC |
| 14550 | TBP | CAAATGCTTCATAAATTTCTG | 16020 | KIF11 | TGAACAGTTTAGCATCATTAA |
| 14560 | TBP | TCAAATGCTTCATAAATTTCT | 16030 | KIF11 | CTGAACAGTTTAGCATCATTA |
| 14570 | TBP | CTGAATCCCTTTAGAATAGGG | 16040 | KIF11 | TCTGAACAGTTTAGCATCATT |
| 14580 | TBP | CGTCGTCTTCCTGAATCCCTT | 16050 | KIF11 | TTTTCTGAACAGTTTAGCATC |
| 14590 | E2F4 | GGGGGCTATCATTGTAGTGAG | 16060 | KIF11 | TTGTTTTCTGAACAGTTTAGC |
| 14600 | E2F4 | GGGGCTATCATTGTAGTGAGT | 16070 | KIF11 | TTTGTTGTTTTCTGAACAGTT |
| 14610 | E2F4 | TAGTGAGTGGCGGCCCTGGGA | 16080 | KIF11 | TCTCTTCTTTGTTGTTTTCTG |
| 14620 | E2F4 | ACTCCCACTGGGCCCAACAAC | 16090 | KIF11 | CCGGAATTGTCTCTTCTTTGT |
| 14630 | E2F4 | TGCCCTGCTGGACAGCAGCAG | 16100 | KIF11 | ACCGGAATTGTCTCTTCTTTG |
| 14640 | E2F4 | GTCCGGACCCAACCCTICTAC | 16110 | KIF11 | AATTTACCGGAATTGTCTCTT |
| 14650 | E2F4 | TACCTCCTTTGAGCCCATCAA | 16120 | KIF11 | AAATTTACCGGAATTGTCTCT |
| 14660 | E2F4 | GAGCCCATCAAGGCAGACCCC | 16130 | KIF11 | AGTATACTGCCCCAGAACTGC |
| 14670 | E2F4 | AGCCCATCAAGGCAGACCCCA | 16140 | KIF11 | TTCAGTATACTGCCCCAGAAC |
| 14680 | E2F4 | CTTGTTTTTCAGTTTTGGAAC | 16150 | KIF11 | GAGGTTCTTCAGTATACTGCC |
| 14690 | E2F4 | TTTTTCAGTTTTGGAACTCCC | 16160 | KIF11 | ACTTAGAGGTTCTTCAGTATA |
| 14700 | E2F4 | TTCAGTTTTGGAACTCCCCAA | 16170 | KIF11 | ATGAACAATCCACACCAGCAT |
| 14710 | E2F4 | TCAGTTTTGGAACTCCCCAAA | 16180 | KIF11 | TCTGATATGACATACCTGGAA |
| 14720 | E2F4 | CAGTTTTGGAACTCCCCAAAG | 16190 | KIF11 | TCTTTTCCATGTGATTTTTTA |
| 14730 | E2F4 | AGTTTTGGAACTCCCCAAAGA | 16200 | KIF11 | GTCTTTTCCATGTGATTTTTT |
| 14740 | E2F4 | TGGAACTCCCCAAAGAGCTGT | 16210 | KIF11 | TTTGTCTTTTCCATGTGATTT |
| 14750 | E2F4 | GGAACTCCCCAAAGAGCTGTC | 16220 | KIF11 | CTTTGTCTTTTCCATGTGATT |
| 14760 | E2F4 | CCAGAGTGCATGAGCTCGGAG | 16230 | KIF11 | TCTTTGTCTTTTCCATGTGAT |
| 14770 | E2F4 | GCCCCTCTGCTTCGTCTTTCT | 16240 | KIF11 | ATGCCTCTGTTTTCTTTGTCT |
| 14780 | E2F4 | CCCCTCTGCTTCGTCTTTCTC | 16250 | KIF11 | GACCTCTCCAGTGTGTTAATG |
| 14790 | E2F4 | GTCTTTCTCCACCCCCGGGAG | 16260 | KIF11 | AGACCTCTCCAGTGTGTTAAT |
| 14800 | E2F4 | CTCCACCCCCGGGAGACCACG | 16270 | KIF11 | CACTTTAGACCTCTCCAGTGT |
| 14810 | E2F4 | TCCACCCCCGGGAGACCACGA | 16280 | KIF11 | TTCCACTTTAGACCTCTCCAG |
| 14820 | E2F4 | TATCTACAACCTGGACGAGAG | 16290 | KIF11 | CTTCCACTTTAGACCTCTCCA |
| 14830 | E2F4 | GATGTGCCTGTTCTCAACCTC | 16300 | KIF11 | TAACCAAGTGCTCTGTAGTTT |
| 14840 | E2F4 | ATGTGCCTGTTCTCAACCTCT | 16310 | KIF11 | GTAACCAAGTGCTCTGTAGTT |
| 14850 | E2F4 | TGCACTGCCAGGGACAGCAGT | 16320 | KIF11 | ATCTGGGCTCGCAGAGGTAAT |
| 14860 | E2F4 | CCTGGACTTCTGCACTGCCAG | 16330 | KIF11 | AAGGTTGATCTGGGCTCGCAG |
| 14870 | E2F4 | CTATCAGTCCCAGGGCCGCCA | 16340 | KIF11 | CCAACCCCCAAGTGAATTAAA |
| 14880 | E2F4 | GGCCCAGTGGGAGTGAACTGA | — | — | — |

TABLE 18
SpyCas9 guide

| SEQ | | Target Domain |
|---|---|---|
| ID NO | Gene | Sequence (DNA) |
| 16350 | GAPDH | TCTAGGTATGACAACGAATT |
| 16360 | GAPDH | AGCCCCAGCGTCAAAGGTGG |
| 16370 | TBP | ATTGTATCCACAGTGAATCT |
| 16380 | TBP | AAACGCCGAATATAATCCCA |
| 16390 | TBP | ACCATTGTAGCGGTTTGCTG |
| 16400 | TBP | GGTTTGCTGCGGTAATCATG |
| 16410 | TBP | GATAAGAGAGCCACGAACCA |
| 16420 | TBP | ACGGCACTGATTTTCAGTTC |
| 16430 | TBP | CGGCACTGATTTTCAGTTCT |
| 16440 | TBP | GATTTTCAGTTCTGGGAAAA |
| 16450 | TBP | TCTGGGAAAATGGTGTGCAC |
| 16460 | TBP | TGGTGTGCACAGGAGCCAAG |
| 16470 | TBP | TAGTGAAGAACAGTCCAGAC |
| 16480 | TBP | TGCTAGAGTTGTACAGAAGT |
| 16490 | TBP | GCTAGAGTTGTACAGAAGTT |
| 16500 | TBP | GGGTTTTCCAGCTAAGTTCT |
| 16510 | TBP | GGACTTCAAGATTCAGAATA |
| 16520 | TBP | CTTCAAGATTCAGAATATGG |
| 16530 | TBP | TTCAAGATTCAGAATATGGT |
| 16540 | TBP | TCAAGATTCAGAATATGGTG |
| 16550 | TBP | GTGATGTGAAGTTTCCTATA |
| 16560 | TBP | AAGTTTCCTATAAGGTTAGA |
| 16570 | TBP | TCACCCACCAACAATTTAGT |
| 16580 | TBP | TATGAGCCAGAGTTATTTCC |
| 16590 | TBP | GTTCTCCTTATTTTTGTTTC |
| 16600 | TBP | TCTGGAAAAGTTGTATTAAC |
| 16610 | TBP | AAACATCTACCCTATTCTAA |
| 16620 | TBP | ACCCTATTCTAAAGGGATTC |
| 16630 | TBP | GATTCAGGAAGACGACGTAA |
| 16640 | TBP | CACGAAGTGCAATGGTCTTT |
| 16650 | TBP | GTTTCGGGCACGAAGTGCAA |
| 16660 | TBP | GGGATTATATTCGGCGTTTC |
| 16670 | TBP | TGGGATTATATTCGGCGTTT |
| 16680 | TBP | TCTAACCTTGGGATTATATT |
| 16690 | TBP | ATTAAAATAGATCTAACCTT |
| 16700 | TBP | AAAATCAGTGCCGTGGTTCG |
| 16710 | TBP | AGAACTGAAAATCAGTGCCG |
| 16720 | TBP | AATTTCTTACGGCTACCTCT |
| 16730 | TBP | AGTCTGGACTGTTCTTCACT |
| 16740 | TBP | ATATTTTCTTGCTGCCAGTC |
| 16750 | TBP | TTGAAGTCCAAGAACTTAGC |
| 16760 | TBP | ACAAGGCCTTCTAACCTTAT |
| 16770 | TBP | ATTGTTGGTGGGTGAGCACA |
| 16780 | TBP | TTACCTACTAAATTGTTGGT |
| 16790 | TBP | CTTACCTACTAAATTGTTGG |
| 16800 | TBP | AGACTTACCTACTAAATTGT |
| 16810 | TBP | ATTAAACCAGGAAATAACTC |
| 16820 | TBP | ATCATTCTGTAGATTAAACC |
| 16830 | TBP | AAAATAAGGAGAACAATTCT |
| 16840 | TBP | CTTTTCCAGAAACAAAAATA |
| 16850 | TBP | TCCTGAATCCCTTTAGAATA |
| 16860 | TBP | TTCCTGAATCCCTTTAGAAT |
| 16870 | E2F4 | CTCACTCCCACTGCTGTCCC |
| 16880 | E2F4 | CCCTGGCAGTGCAGAAGTCC |
| 16890 | E2F4 | CCTGGCAGTGCAGAAGTCCA |
| 16900 | E2F4 | CAGTGCAGAAGTCCAGGGAA |
| 16910 | E2F4 | GCAGAAGTCCAGGGAATGGC |
| 16920 | E2F4 | GGCCCAGCAGCTGAGATCAC |
| 16930 | E2F4 | GGGGCTATCATTGTAGTGAG |
| 16940 | E2F4 | GCTATCATTGTAGTGAGTGG |
| 16950 | E2F4 | ATTGTAGTGAGTGGCGGCCC |
| 16960 | E2F4 | TTGTAGTGAGTGGCGGCCCT |
| 16970 | E2F4 | CGGCCCTGGGACTGATAGCA |
| 16980 | E2F4 | GGGACTGATAGCAAGGACAG |
| 16990 | E2F4 | TGAGCTCAGTTCACTCCCAC |
| 17000 | E2F4 | GAGCTCAGTTCACTCCCACT |
| 17010 | E2F4 | CCCACTGGGCCCAACAACAC |
| 17020 | E2F4 | GCCCAACAACACTGGACACC |
| 17030 | E2F4 | ACTGCAGTCTTCTGCCCTGC |
| 17040 | E2F4 | AGTAACAGCAGCAGTTCGTC |
| 17050 | E2F4 | TACCTCCTTTGAGCCCATCA |
| 17060 | E2F4 | CCCATCAAGGCAGACCCCAC |
| 17070 | E2F4 | ATCAAGGCAGACCCCACAGG |
| 17080 | E2F4 | GAAATCTTTGATCCCACACG |
| 17090 | E2F4 | TCTTTGATCCCACACGAGGT |
| 17100 | E2F4 | ATTCCCAGAGTGCATGAGCT |
| 17110 | E2F4 | GTGCATGAGCTCGGAGCTGC |
| 17120 | E2F4 | GAGGAGTTGATGTCCTCAGA |
| 17130 | E2F4 | GAGTTGATGTCCTCAGAAGG |
| 17140 | E2F4 | AGTTGATGTCCTCAGAAGGT |
| 17150 | E2F4 | GCTTCGTCTTTCTCCACCCC |
| 17160 | E2F4 | CTTCGTCTTTCTCCACCCCC |
| 17170 | E2F4 | CCACGATTATATCTACAACC |
| 17180 | E2F4 | TACAACCTGGACGAGAGTGA |
| 17190 | E2F4 | GCACTGCCAGGGACAGCAGT |
| 17200 | E2F4 | TGCACTGCCAGGGACAGCAG |
| 17210 | E2F4 | CCTGGACTTCTGCACTGCCA |
| 17220 | E2F4 | CCCTGGACTTCTGCACTGCC |
| 17230 | E2F4 | CTGCTGGGCCAGCCATTCCC |
| 17240 | E2F4 | TGTCCTTGCTATCAGTCCCA |
| 17250 | E2F4 | CTGTCCTTGCTATCAGTCCC |
| 17260 | E2F4 | CCAGTGTTGTTGGGCCCAGT |
| 17270 | E2F4 | TCCAGTGTTGTTGGGCCCAG |
| 17280 | E2F4 | GCCGGGTGTCCAGTGTTGTT |
| 17290 | E2F4 | GGCCGGGTGTCCAGTGTTGT |
| 17300 | E2F4 | AGCAGGGCAGAAGACTGCAG |
| 17310 | E2F4 | GCTGCTGCTGCTGTCCAGCA |
| 17320 | E2F4 | GGAGGTAGAAGGGTTGGGTC |
| 17330 | E2F4 | TGGGCTCAAAGGAGGTAGAA |
| 17340 | E2F4 | ATGGGCTCAAAGGAGGTAGA |
| 17350 | E2F4 | TGCCTTGATGGGCTCAAAGG |
| 17360 | E2F4 | GTCTGCCTTGATGGGCTCAA |
| 17370 | E2F4 | CCTGTGGGGTCTGCCTTGAT |
| 17380 | E2F4 | ACCTGTGGGGTCTGCCTTGA |
| 17390 | E2F4 | GCAGGTACTCACCACCTGTG |
| 17400 | E2F4 | GGCAGGTACTCACCACCTGT |
| 17410 | E2F4 | GGGCAGGTACTCACCACCTG |
| 17420 | E2F4 | AGATTTCTGACAGCTCTTTG |
| 17430 | E2F4 | AAGATTTCTGACAGCTCTTT |
| 17440 | E2F4 | AAAGATTTCTGACAGCTCTT |
| 17450 | E2F4 | TGCAGCAGCCTACCTCGTGT |
| 17460 | E2F4 | ATGCAGCAGCCTACCTCGTG |
| 17470 | E2F4 | GCTCCGAGCTCATGCACTCT |
| 17480 | E2F4 | AGCTCCGAGCTCATGCACTC |
| 17490 | E2F4 | CCAGGGCCACCCACCTTCTG |
| 17500 | E2F4 | TGGAGAAAGACGAAGCAGAG |
| 17510 | E2F4 | GTGGAGAAAGACGAAGCAGA |
| 17520 | E2F4 | GGTGGAGAAAGACGAAGCAG |
| 17530 | E2F4 | TAATCGTGGTCTCCCGGGGG |
| 17540 | E2F4 | ATATAATCGTGGTCTCCCGG |
| 17550 | E2F4 | GATATAATCGTGGTCTCCCG |
| 17560 | E2F4 | AGATATAATCGTGGTCTCCC |
| 17570 | E2F4 | TAGATATAATCGTGGTCTCC |
| 17580 | E2F4 | CCAGGTTGTAGATATAATCG |
| 17590 | E2F4 | AGACACCTTCACTCTCGTCC |
| 17600 | E2F4 | TGAGAACAGGCACATCAAAG |
| 17610 | G6PD | GTGGGGGTTCACCCACTTGT |
| 17620 | G6PD | ACTTGTAGGTGCCCTCATAC |
| 17630 | G6PD | CATCAGCTCGTCTGCCTCCG |
| 17640 | G6PD | ATCAGCTCGTCTGCCTCCGT |
| 17650 | G6PD | TCAGCTCGTCTGCCTCCGTG |
| 17660 | G6PD | CGTCTGCCTCCGTGGGGCCT |
| 17670 | G6PD | TGCCTCCGTGGGGCCTCGGC |
| 17680 | G6PD | TCCTCACCTGCCATAAATAT |
| 17690 | G6PD | CCTCACCTGCCATAAATATA |
| 17700 | G6PD | CTCACCTGCCATAAATATAG |
| 17710 | G6PD | CCTGCCATAAATATAGGGGA |
| 17720 | G6PD | CTGCCATAAATATAGGGGAT |
| 17730 | G6PD | ATAAATATAGGGGATGGGCT |
| 17740 | G6PD | TAAATATAGGGGATGGGCTT |
| 17750 | G6PD | TGGGCTTCTCCAGCTCAATC |
| 17760 | G6PD | AGCTCAATCTGGIGCAGCAG |
| 17770 | G6PD | GCTCAATCTGGTGCAGCAGT |
| 17780 | G6PD | CTCAATCTGGTGCAGCAGTG |
| 17790 | G6PD | CAGTGGGGTGAAAATACGCC |
| 17800 | G6PD | TGAAAATACGCCAGGCCTCA |
| 17810 | G6PD | CCTCACGGAGCTCGTCGCTG |
| 17820 | G6PD | ACCTGCGCACGAAGTGCATC |
| 17830 | G6PD | GGCTCCCGCAGAAGACGTCC |
| 17840 | G6PD | CGCAGAAGACGTCCAGGATG |
| 17850 | G6PD | GTCCAGGATGAGGCGCTCAT |
| 17860 | G6PD | ATGAGGCGCTCATAGGCGTC |
| 17870 | G6PD | TGAGGCGCTCATAGGCGTCA |
| 17880 | G6PD | CACCTTGTATCTGTTGCCGT |
| 17890 | G6PD | TGTATCTGTTGCCGTAGGTC |
| 17900 | G6PD | CAGGTCCAGCTCCGACTCCT |
| 17910 | G6PD | AGGTCCAGCTCCGACTCCTC |
| 17920 | G6PD | GGTCCAGCTCCGACTCCTCG |
| 17930 | G6PD | TCGGGGTTGAAGAACATGCC |
| 17940 | G6PD | GAAGAACATGCCCGGCTTCT |
| 17950 | G6PD | CGGCTTCTTGGTCATCATCT |
| 17960 | G6PD | GGTCATCATCTTGGTGTACA |
| 17970 | G6PD | CTTGGTGTACACGGCCTCGT |
| 17980 | G6PD | TTGGTGTACACGGCCTCGTT |
| 17990 | G6PD | CGGCCTCGTTGGGCTGCACG |
| 18000 | G6PD | GCTCGTTGCGCTTGCACTGC |
| 18010 | G6PD | CGTTGCGCTTGCACTGCTGG |
| 18020 | G6PD | CTGCTGGIGGAAGATGTCGC |
| 18030 | G6PD | AGATGTCGCCGGCCACATCA |
| 18040 | G6PD | ATGGAACTGCAGCCTCACCT |
| 18050 | G6PD | CCTCGGCCTTGCGCTCGTTC |
| 18060 | G6PD | CTCGGCCTTGCGCTCGTTCA |
| 18070 | G6PD | TCAGGGCCTTGCCGCAGCGC |
| 18080 | G6PD | CTTGCCGCAGCGCAGGATGA |
| 18090 | G6PD | TTGCCGCAGCGCAGGATGAA |
| 18100 | G6PD | GTATGAGGGCACCTACAAGT |
| 18110 | G6PD | AGTATGAGGGCACCTACAAG |
| 18120 | G6PD | AGAGTGGGTTTCCAGTATGA |
| 18130 | G6PD | GAGAGTGGGTTTCCAGTATG |
| 18140 | G6PD | GACGAGCTGATGAAGAGAGT |
| 18150 | G6PD | AGACGAGCTGATGAAGAGAG |
| 18160 | G6PD | CTCCAGCCGAGGCCCCACGG |
| 18170 | G6PD | CACCCGTCACTCICCAGCCG |
| 18180 | G6PD | CCATCCCCTATATTTATGGC |
| 18190 | G6PD | AAGCCCATCCCCTATATTTA |
| 18200 | G6PD | ACTGCTGCACCAGATTGAGC |
| 18210 | G6PD | GCGACGAGCTCCGTGAGGCC |
| 18220 | G6PD | CCTCAGCGACGAGCTCCGTG |
| 18230 | G6PD | GCCAGATGCACTTCGTGCGC |
| 18240 | G6PD | TCATCCTGGACGICTTCTGC |
| 18250 | G6PD | CTCATCCTGGACGTCTTCTG |
| 18260 | G6PD | CGCCTATGAGCGCCTCATCC |
| 18270 | G6PD | GACCTACGGCAACAGATACA |
| 18280 | G6PD | TCGGAGCTGGACCTGACCTA |
| 18290 | G6PD | CAACCCCGAGGAGTCGGAGC |
| 18300 | G6PD | GTTCTTCAACCCCGAGGAGT |
| 18310 | G6PD | GGGCATGTTCTTCAACCCCG |
| 18320 | G6PD | AAGATGATGACCAAGAAGCC |
| 18330 | G6PD | CAAGATGATGACCAAGAAGC |
| 18340 | G6PD | GATCCGCGTGCAGCCCAACG |
| 18350 | G6PD | GCAGTGCAAGCGCAACGAGC |
| 18360 | G6PD | CTGCAGTTCCATGATGTGGC |
| 18370 | G6PD | GAGGCTGCAGTTCCATGATG |
| 18380 | G6PD | ACGAGCGCAAGGCCGAGGTG |
| 18390 | G6PD | CCTGAACGAGCGCAAGGCCG |
| 18400 | G6PD | CAAGGCCCTGAACGAGCGCA |
| 18410 | G6PD | CTTCATCCTGCGCTGCGGCA |
| 18420 | G6PD | GTGCCCTTCATCCTGCGCTG |
| 18430 | G6PD | AGAATGAGAGGTGGGATGGT |
| 18440 | G6PD | GTGGAGAATGAGAGGTGGGA |
| 18450 | KIF11 | CTTAATGAAACCATAAAAAT |
| 18460 | KIF11 | GACTAAGCTTAATTGCTTTC |
| 18470 | KIF11 | GCTTAATTGCTTTCTGGAAC |
| 18480 | KIF11 | TCTGGAACAGGATCTGAAAC |
| 18490 | KIF11 | CTGAAACTGGATATCCCAAC |
| 18500 | KIF11 | TTAAAGGTACGACACCACAG |
| 18510 | KIF11 | TTATTTATACCCATCAACAC |
| 18520 | KIF11 | ATCTCCTTGATCAGCTGAAA |
| 18530 | KIF11 | CAACAAAGAAGAGACAATTC |
| 18540 | KIF11 | TTAGGATGTGGATGTAGAAG |
| 18550 | KIF11 | GGATGTAGAAGAGGCAGTTC |
| 18560 | KIF11 | GATGTAGAAGAGGCAGTTCT |
| 18570 | KIF11 | ATGTAGAAGAGGCAGTTCTG |
| 18580 | KIF11 | CAAGAGCCATCTGTAGATGC |
| 18590 | KIF11 | GCCATCTGTAGATGCTGGTG |
| 18600 | KIF11 | GGTGTGGATTGTTCATCAAT |
| 18610 | KIF11 | GTGGATTGTTCATCAATTGG |
| 18620 | KIF11 | TGGATTGTTCATCAATTGGC |
| 18630 | KIF11 | GGATTGTTCATCAATTGGCG |
| 18640 | KIF11 | TGGCGGGGTTCCATTTTTCC |
| 18650 | KIF11 | CCACAGCATAAAAAATCACA |
| 18660 | KIF11 | GGAAAAGACAAAGAAAACAG |
| 18670 | KIF11 | AAACAGAGGCATTAACACAC |
| 18680 | KIF11 | GAGGCATTAACACACTGGAG |
| 18690 | KIF11 | CACACTGGAGAGGTCTAAAG |
| 18700 | KIF11 | GGAAGAAACTACAGAGCACT |
| 18710 | KIF11 | CTTAGTCAAACCAATTTTTA |
| 18720 | KIF11 | TCTCTTTTAAAGTACCTGTT |
| 18730 | KIF11 | TTCTCTTTTAAAGTACCTGT |
| 18740 | KIF11 | TATAAATAACTTTTCCTCTG |
| 18750 | KIF11 | CAGTTCTTACCAGTGTTGAT |
| 18760 | KIF11 | TCAGTTCTTACCAGTGTTGA |
| 18770 | KIF11 | TGATCAAGGAGATGTTCACG |
| 18780 | KIF11 | GTTTCCTTTTCAGCTGATCA |
| 18790 | KIF11 | TTTAGCATCATTAACAGCTC |
| 18800 | KIF11 | ACAGATGGCTCTTGACTTAG |
| 18810 | KIF11 | TCCACACCAGCATCTACAGA |
| 18820 | KIF11 | ATATGACATACCTGGAAAAA |
| 18830 | KIF11 | AGGTTGATCTGGGCTCGCAG |
| 18840 | KIF11 | AGTGAATTAAAGGTTGATCT |
| 18850 | KIF11 | AAGTGAATTAAAGGTTGATC |
| — | — | — |

[0397] It will be understood that the exemplary gRNAs disclosed herein are provided to illustrate non-limiting embodiments embraced by the present disclosure. Additional suitable gRNA sequences will be apparent to the skilled artisan based on the present disclosure, and the disclosure is not limited in this respect.

### Methods of Characterization

[0398] Methods of characterizing cells including characterizing cellular phenotype are known to those of skill in the art. In some embodiments, one or more such methods may include, but not be limited to, for example, morphological analyses and flow cytometry. Cellular lineage and identity markers are known to those of skill in the art. One or more such markers may be combined with one or more characterization methods to determine a composition of a cell population or phenotypic identity of one or more cells. For example, in some embodiments, cells of a particular population will be characterized using flow cytometry (for example, see Ye Li et al., Cell Stem Cell. 2018 Aug. 2; 23 (2): 181-192.e5). In some such embodiments, a sample of a population of cells will be evaluated for presence and proportion of one or more cell surface markers and/or one or more intracellular markers. As will be understood by those of skill in the art, such cell surface markers may be representative of different lineages. For example, pluripotent cells may be identified by one or more of any number of markers known to be associated with such cells, such as, for example, CD34. Further, in some embodiments, cells may be identified by markers that indicate some degree of differentiation. Such markers will be known to one of skill in the art. For example, in some embodiments, markers of differentiated cells may include those associated with differentiated hematopoietic cells such as, e.g., CD43, CD45 (differentiated hematopoietic cells). In some embodiments, markers of differentiated cells may be associated with NK cell phenotypes such as, e.g., CD56, NK cell receptor immunoglobulin gamma Fc region receptor III (FcγRIII, cluster of differentiation 16 (CD16)), natural killer group-2 member D (NKG2D), CD69, a natural cytotoxicity receptor, etc. In some embodiments, markers may be T cell markers (e.g., CD3, CD4, CD8, etc.).

### Methods of Use

[0399] A variety of diseases, disorders and/or conditions may be treated through use of cells provided by the present disclosure. For example, in some embodiments, a disease, disorder and/or condition may be treated by introducing genetically modified or engineered cells as described herein (e.g., genetically modified NK or iNK cells) to a subject. Examples of diseases that may be treated include, but are not limited to, cancer, e.g., solid tumors, e.g., of the brain, prostate, breast, lung, colon, uterus, skin, liver, bone, pancreas, ovary, testes, bladder, kidney, head, neck, stomach, cervix, rectum, larynx, or esophagus; and hematological malignancies, e.g., acute and chronic leukemias, lymphomas, multiple myeloma and myelodysplastic syndromes.

[0400] In some embodiments, the present disclosure provides methods of treating a subject in need thereof by administering to the subject a composition comprising any of the cells described herein. In some embodiments, a therapeutic agent or composition may be administered before, during, or after the onset of a disease, disorder, or condition (including, e.g., an injury). In some embodiments, the present disclosure provides any of the cells described herein for use in the preparation of a medicament. In some embodiments, the present disclosure provides any of the cells described herein for use in the treatment of a disease, disorder, or condition, that can be treated by a cell therapy.

[0401] In particular embodiments, the subject has a disease, disorder, or condition, that can be treated by a cell therapy. In some embodiments, a subject in need of cell therapy is a subject with a disease, disorder and/or condition, whereby a cell therapy, e.g., a therapy in which a composition comprising a cell described herein, is administered to the subject, whereby the cell therapy treats at least one symptom associated with the disease, disorder, and/or condition. In some embodiments, a subject in need of cell therapy includes, but is not limited to, a candidate for bone marrow or stem cell transplant, a subject who has received chemotherapy or irradiation therapy, a subject who has or is at risk of having cancer, e.g., a cancer of hematopoietic system, a subject having or at risk of developing a tumor, e.g., a solid tumor, and/or a subject who has or is at risk of having a viral infection or a disease associated with a viral infection.

### Pharmaceutical Compositions

[0402] In some embodiments, the present disclosure provides pharmaceutical compositions comprising one or more genetically modified or engineered cells described herein, e.g., a genetically modified primary cell described herein. In some embodiments, a pharmaceutical composition further comprises a pharmaceutically acceptable excipient. In some embodiments, a pharmaceutical composition comprises isolated T cells comprising at least 50%, 60%, 70%, 80%, 90%, 95%, 98%, or 99% genetically modified (e.g., edited) T cells. In some embodiments, a pharmaceutical composition comprises isolated pluripotent stem cell-derived hematopoietic lineage cells comprising at least 50%, 60%, 70%, 80%, 90%, 95%, 98%, or 99% T cells, NK cells, NKT cells, CD34+ HE cells or HSCs, e.g., genetically modified (e.g., edited) T cells, NK cells, NKT cells, CD34+ HE cells or HSCs. In some embodiments, a pharmaceutical composition comprises isolated pluripotent stem cell-derived hematopoietic lineage cells comprising about 95% to about 100% T cells, NK cells, NKT cells, CD34+ HE cells or HSCs, e.g., genetically modified (e.g., edited) T cells, NK cells, NKT cells, CD34+ HE cells or HSCs.

[0403] In some embodiments, a pharmaceutical composition of the present disclosure comprises an isolated population of pluripotent stem cell-derived hematopoietic lineage cells, wherein the isolated population has less than about 0.1%, 0.5%, 1%, 2%, 5%, 10%, 15%, 20%, 25%, or 30% T cells, NK cells, NKT cells, CD34+ HE cells or HSCs, e.g., genetically modified (e.g., edited) T cells, NK cells, NKT cells, CD34+ HE cells or HSCs. In some embodiments, an isolated population of pluripotent stem cell-derived hematopoietic lineage cells has more than about 0.1%, 0.5%, 1%, 2%, 5%, 10%, 15%, 20%, 25%, or 30% T cells, NK cells, NKT cells, CD34+ HE cells or HSCs, e.g., genetically modified (e.g., edited) T cells, NK cells, NKT cells, CD34+ HE cells or HSCs. In some embodiments, an isolated population of pluripotent stem cell-derived hematopoietic lineage cells has about 0.1% to about 1%, about 1% to about 3%, about 3% to about 5%, about 10%-15%, about 15%-20%, about 20%-25%, about 25%-30%, about 30%-35%, about 35%-40%, about 40%-45%, about 45%-50%, about 60%-70%, about 70%-80%, about 80%-90%, about 90%-95%, or about 95% to about 100% T cells, NK cells, NKT cells, CD34+ HE cells or HSCs, e.g., genetically modified (e.g., edited) T cells, NK cells, NKT cells, CD34+ HE cells or HSCs.

[0404] In some embodiments, an isolated population of pluripotent stem cell-derived hematopoietic lineage cells comprises about 0.1%, about 1%, about 3%, about 5%, about 10%, about 15%, about 20%, about 25%, about 30%, about 35%, about 40%, about 45%, about 50%, about 60%, about 70%, about 80%, about 90%, about 95%, about 98%, about 99%, or about 100% T cells, NK cells, NKT cells, CD34+ HE cells or HSCs, e.g., genetically modified (e.g., edited) T cells, NK cells, NKT cells, CD34+ HE cells or HSCs.

[0405] As one of ordinary skill in the art would understand, both autologous and allogeneic cells can be used in adoptive cell therapies. Autologous cell therapies generally have reduced infection, low probability for GVHD, and rapid immune reconstitution relative to other cell therapies. Allogeneic cell therapies generally have an immune mediated graft-versus-malignancy (GVM) effect, and low rate of relapse relative to other cell therapies. Based on the specific condition(s) of the subject in need of the cell therapy, one of ordinary skill in the art would be able to determine which specific type of therapy (ies) to administer.

[0406] In some embodiments, a pharmaceutical composition comprises genetically modified (e.g., edited) T cells that are allogenic to a subject. In some embodiments, a pharmaceutical composition comprises genetically modified (e.g., edited) T cells that are autologous to a subject. In some embodiments, a pharmaceutical composition comprises pluripotent stem cell-derived hematopoietic lineage cells that are allogeneic to a subject. In some embodiments, a pharmaceutical composition comprises pluripotent stem cell-derived hematopoietic lineage cells that are autologous to a subject. For autologous transplantation, the isolated population of pluripotent stem cell-derived hematopoietic lineage cells can be either a complete or partial HLA-match with the subject being treated. In some embodiments, the pluripotent stem cell-derived hematopoietic lineage cells are not HLA-matched to a subject.

[0407] In some embodiments, pluripotent stem cell-derived hematopoietic lineage cells can be administered to a subject without being expanded ex vivo or in vitro prior to administration. In particular embodiments, an isolated population of derived hematopoietic lineage cells is modulated and treated ex vivo using one or more agents to obtain immune cells with improved therapeutic potential. In some embodiments, the modulated population of derived hematopoietic lineage cells can be washed to remove the treatment agent(s), and the improved population can be administered to a subject without further expansion of the population in vitro. In some embodiments, an isolated population of derived hematopoietic lineage cells is expanded prior to modulating the isolated population with one or more agents.

[0408] In some embodiments, an isolated population of derived hematopoietic lineage cells can be genetically modified according to the methods of the present disclosure to express a recombinant TCR, CAR or other gene product of interest. For genetically engineered derived hematopoietic lineage cells that express a recombinant TCR or CAR, whether prior to or after genetic modification of the cells, the cells can be activated and expanded using methods as described, for example, in U.S. Pat. Nos. 6,352,694; 6,534,055; 6,905,680; 6,692,964; 5,858,358; 6,887,466; 6,905,681; 7,144,575; 7,067,318; 7,172,869; 7,232,566; 7,175,843; 5,883,223; 6,905,874; 6,797,514; 6,867,041; and U.S. Patent Application Publication No. 20060121005.

### Cancers

[0409] Any cancer can be treated using a cell or pharmaceutical composition described herein. Exemplary therapeutic targets of the present disclosure include cancer cells from the bladder, blood, bone, bone marrow, brain, breast, colon, esophagus, eye, gastrointestinal system, gum, head, kidney, liver, lung, nasopharynx, neck, ovary, prostate, skin, stomach, testis, tongue, or uterus. In addition, a cancer may specifically be of the following non-limiting histological type: neoplasm, malignant; carcinoma; carcinoma, undifferentiated; giant and spindle cell carcinoma; small cell carcinoma; papillary carcinoma; squamous cell carcinoma; lymphoepithelial carcinoma; basal cell carcinoma; pilomatrix carcinoma; transitional cell carcinoma; papillary transitional cell carcinoma; adenocarcinoma; gastrinoma, malignant; cholangiocarcinoma; hepatocellular carcinoma; combined hepatocellular carcinoma and cholangiocarcinoma; trabecular adenocarcinoma; adenoid cystic carcinoma; adenocarcinoma in adenomatous polyp; adenocarcinoma, familial polyposis coli; solid carcinoma; carcinoid tumor, malignant; branchiolo-alveolar adenocarcinoma; papillary adenocarcinoma; chromophobe carcinoma; acidophil carcinoma; oxyphilic adenocarcinoma; basophil carcinoma; clear cell adenocarcinoma; granular cell carcinoma; follicular adenocarcinoma; papillary and follicular adenocarcinoma; nonencapsulating sclerosing carcinoma; adrenal cortical carcinoma; endometroid carcinoma; skin appendage carcinoma; apocrine adenocarcinoma; sebaceous adenocarcinoma; ceruminous adenocarcinoma; mucoepidermoid carcinoma; cystadenocarcinoma; papillary cystadenocarcinoma; papillary serous cystadenocarcinoma; mucinous cystadenocarcinoma; mucinous adenocarcinoma; signet ring cell carcinoma; infiltrating duct carcinoma; medullary carcinoma; lobular carcinoma; inflammatory carcinoma; Paget's disease, mammary; acinar cell carcinoma; adenosquamous carcinoma; adenocarcinoma w/squamous metaplasia; thymoma, malignant; ovarian stromal tumor, malignant; thecoma, malignant; granulosa cell tumor, malignant; androblastoma, malignant; sertoli cell carcinoma; Leydig cell tumor, malignant; lipid cell tumor, malignant; paraganglioma, malignant; extra-mammary paraganglioma, malignant; pheochromocytoma; glomangiosarcoma; malignant melanoma; amelanotic melanoma; superficial spreading melanoma; malig melanoma in giant pigmented nevus; epithelioid cell melanoma; blue nevus, malignant; sarcoma; fibrosarcoma; fibrous histiocytoma, malignant; myxosarcoma; liposarcoma; leiomyosarcoma; rhabdomyosarcoma; embryonal rhabdomyosarcoma; alveolar rhabdomyosarcoma; stromal sarcoma; mixed tumor, malignant; mullerian mixed tumor; nephroblastoma; hepatoblastoma; carcinosarcoma; mesenchymoma, malignant; brenner tumor, malignant; phyllodes tumor, malignant; synovial sarcoma; mesothelioma, malignant; dysgerminoma; embryonal carcinoma; teratoma, malignant; struma ovarii, malignant; choriocarcinoma; mesonephroma, malignant; hemangiosarcoma; hemangioendothelioma, malignant; Kaposi sarcoma; hemangiopericytoma, malignant; lymphangiosarcoma; osteosarcoma; juxtacortical osteosarcoma; chondrosarcoma; chondroblastoma, malignant; mesenchymal chondrosarcoma; giant cell tumor of bone; Ewing sarcoma; odontogenic tumor, malignant; ameloblastic odontosarcoma; ameloblastoma, malignant; ameloblastic fibrosarcoma; pinealoma, malignant; chordoma; glioma, malignant; ependymoma; astrocytoma; protoplasmic astrocytoma; fibrillary astrocytoma; astroblastoma; glioblastoma; oligodendroglioma; oligodendroblastoma; primitive neuroectodermal; cerebellar sarcoma; ganglioneuroblastoma; neuroblastoma; retinoblastoma; olfactory neurogenic tumor; meningioma, malignant; neurofibrosarcoma; neurilemmoma, malignant; granular cell tumor, malignant; malignant lymphoma; Hodgkin's disease; Hodgkin's lymphoma; paragranuloma; malignant lymphoma, small lymphocytic; malignant lymphoma, large cell, diffuse; malignant lymphoma, follicular; mycosis fungoides; other specified non-Hodgkin's lymphomas; malignant histiocytosis; multiple myeloma; mast cell sarcoma; immunoproliferative small intestinal disease; leukemia; lymphoid leukemia; plasma cell leukemia; erythroleukemia; lymphosarcoma cell leukemia; myeloid leukemia; basophilic leukemia; eosinophilic leukemia; monocytic leukemia; mast cell leukemia; megakaryoblastic leukemia; myeloid sarcoma; and hairy cell leukemia.

[0410] In some embodiments, the cancer is a breast cancer. In some embodiments, the cancer is colorectal cancer (e.g., colon cancer). In some embodiments, the cancer is gastric cancer. In some embodiments, the cancer is RCC. In some embodiments, the cancer is non-small cell lung cancer (NSCLC). In some embodiments, the cancer is head and neck cancer.

[0411] In some embodiments, solid cancer indications that can be treated with cells described herein (e.g., cells modified using methods of the disclosure, e.g., genetically modified T cells), either alone or in combination with one or more additional cancer treatment modality, include: bladder cancer, hepatocellular carcinoma, prostate cancer, ovarian/uterine cancer, pancreatic cancer, mesothelioma, melanoma, glioblastoma, HPV-associated and/or HPV-positive cancers such as cervical and HPV+head and neck cancer, oral cavity cancer, cancer of the pharynx, thyroid cancer, gallbladder cancer, and soft tissue sarcomas. In some embodiments, hematological cancer indications that can be treated with cells described herein (e.g., cells modified using methods of the disclosure, e.g., genetically modified iNK cells), either alone or in combination with one or more additional cancer treatment modalities, include: ALL, CLL, NHL, DLBCL, AML, CML, and multiple myeloma (MM).

[0412] In some embodiments, examples of cellular proliferative and/or differentiative disorders of the lung that can be treated with cells described herein (e.g., cells modified using methods of the disclosure) include, but are not limited to, tumors such as bronchogenic carcinoma, including paraneoplastic syndromes, bronchioloalveolar carcinoma, neuroendocrine tumors, such as bronchial carcinoid, miscellaneous tumors, metastatic tumors, and pleural tumors, including solitary fibrous tumors (pleural fibroma) and malignant mesothelioma.

[0413] In some embodiments, examples of cellular proliferative and/or differentiative disorders of the breast that can be treated with cells described herein (e.g., cells modified using methods of the disclosure) include, but are not limited to, proliferative breast disease including, e.g., epithelial hyperplasia, sclerosing adenosis, and small duct papillomas; tumors, e.g., stromal tumors such as fibroadenoma, phyllodes tumor, and sarcomas, and epithelial tumors such as large duct papilloma; carcinoma of the breast including in situ (noninvasive) carcinoma that includes ductal carcinoma in situ (including Paget's disease) and lobular carcinoma in situ, and invasive (infiltrating) carcinoma including, but not limited to, invasive ductal carcinoma, invasive lobular carcinoma, medullary carcinoma, colloid (mucinous) carcinoma, tubular carcinoma, and invasive papillary carcinoma, and miscellaneous malignant neoplasms. Disorders in the male breast include, but are not limited to, gynecomastia and carcinoma.

[0414] In some embodiments, examples of cellular proliferative and/or differentiative disorders involving the colon that can be treated with cells described herein (e.g., cells modified using methods of the disclosure) include, but are not limited to, tumors of the colon, such as non-neoplastic polyps, adenomas, familial syndromes, colorectal carcinogenesis, colorectal carcinoma, and carcinoid tumors.

[0415] In some embodiments, examples of cancers or neoplastic conditions, in addition to the ones described above that can be treated with cells described herein (e.g., cells modified using methods of the disclosure), include, but are not limited to, a fibrosarcoma, myosarcoma, liposarcoma, chondrosarcoma, osteogenic sarcoma, chordoma, angiosarcoma, endotheliosarcoma, lymphangiosarcoma, lymphangioendotheliosarcoma, synovioma, mesothelioma, Ewing's tumor, leiomyosarcoma, rhabdomyosarcoma, gastric cancer, esophageal cancer, rectal cancer, pancreatic cancer, ovarian cancer, prostate cancer, uterine cancer, cancer of the head and neck, skin cancer, brain cancer, squamous cell carcinoma, sebaceous gland carcinoma, papillary carcinoma, papillary adenocarcinoma, cystadenocarcinoma, medullary carcinoma, bronchogenic carcinoma, renal cell carcinoma, hepatoma, bile duct carcinoma, choriocarcinoma, seminoma, embryonal carcinoma, Wilm's tumor, cervical cancer, testicular cancer, small cell lung carcinoma, non-small cell lung carcinoma, bladder carcinoma, epithelial carcinoma, glioma, astrocytoma, medulloblastoma, craniopharyngioma, ependymoma, pinealoma, hemangioblastoma, acoustic neuroma, oligodendroglioma, meningioma, melanoma, neuroblastoma, retinoblastoma, leukemia, lymphoma, or Kaposi sarcoma.

[0416] In some embodiments, cells described herein (e.g., cells modified using methods of the disclosure) are used in combination with one or more cancer treatment modalities. In some embodiments, other cancer treatment modalities include, but are not limited to: chemotherapeutic agents include alkylating agents such as thiotepa and CYTOXAN® cyclosphosphamide; alkyl sulfonates such as busulfan, improsulfan and piposulfan; aziridines such as benzodopa, carboquone, meturedopa, and uredopa; ethylenimines and methylamelamines including altretamine, triethylenemelamine, trietylenephosphoramide, triethiylenethiophosphoramide and trimethylolomelamine; acetogenins (especially bullatacin and bullatacinone); delta-9-tetrahydrocannabinol (dronabinol, MARINOL®); beta-lapachone; lapachol; colchicines; betulinic acid; a camptothecin (including the synthetic analogue topotecan (HYCAMTIN®), CPT-11 (irinotecan, CAMPTOSAR®), acetylcamptothecin, scopolectin, and 9-aminocamptothecin); bryostatin; callystatin; CC-1065 (including its adozelesin, carzelesin and bizelesin synthetic analogues); podophyllotoxin; podophyllinic acid; teniposide; cryptophycins (particularly cryptophycin 1 and cryptophycin 8); dolastatin; duocarmycin (including the synthetic analogues, KW-2189 and CB1-TM1); eleutherobin; pancratistatin; a sarcodictyin; spongistatin; nitrogen mustards such as chlorambucil, chlornaphazine, cholophosphamide, estramustine, ifosfanide, mechlorethamine, mechlorethamine oxide hydrochloride, melphalan, novembichin, phenesterine, prednimustine, trofosfamide, uracil mustard; nitrosureas such as carmustine, chlorozotocin, fotemustine, lomustine, nimustine, and ranimnustine; antibiotics such as the enediyne antibiotics (e.g., calicheamicin, especially calicheamicin gammalI and calicheamicin omegall (see, e.g., Agnew, Chem. Intl. Ed. Engl., 1994; 33:183-186); dynemicin, including dynemicin A; an esperamicin; as well as neocarzinostatin chromophore and related chromoprotein enediyne antiobiotic chromophores), aclacinomysins, actinomycin, authramycin, azaserine, bleomycins, cactinomycin, carabicin, caminomycin, carzinophilin, chromomycinis, dactinomycin, daunorubicin, detorubicin, 6-diazo-5-oxo-L-norleucine, doxorubicin (including ADRIAMYCIN®, morpholino-doxorubicin, cyanomorpholino-doxorubicin, 2-pyrrolino-doxorubicin, doxorubicin HCl liposome injection (DOXIL®) and deoxydoxorubicin), epirubicin, esorubicin, idarubicin, marcellomycin, mitomycins such as mitomycin C, mycophenolic acid, nogalamycin, olivomycins, peplomycin, potfiromycin, puromycin, quelamycin, rodorubicin, streptonigrin, streptozocin, tubercidin, ubenimex, zinostatin, zorubicin; anti-metabolites such as methotrexate, gemcitabine (GEMZAR®), tegafur (UFTORAL®), capecitabine (XELODA®), an epothilone, and 5-fluorouracil (5-FU); folic acid analogues such as denopterin, methotrexate, pteropterin, trimetrexate; purine analogs such as fludarabine, 6-mercaptopurine, thiamiprine, thioguanine; pyrimidine analogs such as ancitabine, azacitidine, 6-azauridine, carmofur, cytarabine, dideoxyuridine, doxifluridine, enocitabine, floxuridine; androgens such as calusterone, dromostanolone propionate, epitiostanol, mepitiostane, testolactone; anti-adrenals such as aminoglutethimide, mitotane, trilostane; folic acid replenisher such as frolinic acid; aceglatone; aldophosphamide glycoside; aminolevulinic acid; eniluracil; amsacrine; bestrabucil; bisantrene; edatraxate; defofamine; demecolcine; diaziquone; elformithine; elliptinium acetate; etoglucid; gallium nitrate; hydroxyurea; lentinan; lonidainine; maytansinoids such as maytansine and ansamitocins; mitoguazone; mitoxantrone; mopidanmol; nitraerine; pentostatin; phenamet; pirarubicin; losoxantrone; 2-ethylhydrazide; procarbazine; PSK® polysaccharide complex (JHS Natural Products, Eugene, Oreg.); razoxane; rhizoxin; sizofuran; spirogermanium; tenuazonic acid; triaziquone; 2,2′,2″-trichlorotriethylamine; trichothecenes (especially T-2 toxin, verracurin A, roridin A and anguidine); urethan; vindesine (ELDISINE®, FILDESIN®); dacarbazine; mannomustine; mitobronitol; mitolactol; pipobroman; gacytosine; arabinoside (“Ara-C”); thiotepa; taxoids, e.g., paclitaxel (TAXOL®), albumin-engineered nanoparticle formulation of paclitaxel (ABRAXANET™), and doxetaxel (TAXOTERE®); chloranbucil; 6-thioguanine; mercaptopurine; methotrexate; platinum analogs such as cisplatin and carboplatin; vinblastine (VELBAN®); platinum; etoposide (VP-16); ifosfamide; mitoxantrone; vincristine (ONCOVIN®); oxaliplatin; leucovovin; vinorelbine (NAVELBINE®); novantrone; edatrexate; daunomycin; aminopterin; cyclosporine, sirolimus, rapamycin, rapalogs, ibandronate; topoisomerase inhibitor RFS 2000; difluoromethylornithine (DMFO); retinoids such as retinoic acid; CHOP, an abbreviation for a combined therapy of cyclophosphamide, doxorubicin, vincristine, and prednisolone, and FOLFOX, an abbreviation for a treatment regimen with oxaliplatin (ELOXATIN™) combined with 5-FU, leucovovin; anti-estrogens and selective estrogen receptor modulators (SERMs), including, for example, tamoxifen (including NOLVADEX® tamoxifen), raloxifene (EVISTA®), droloxifene, 4-hydroxytamoxifen, trioxifene, keoxifene, LY117018, onapristone, and toremifene (FARESTON®); anti-progesterones; estrogen receptor down-regulators (ERDs); estrogen receptor antagonists such as fulvestrant (FASLODEX®); agents that function to suppress or shut down the ovaries, for example, leutinizing hormone-releasing hormone (LHRH) agonists such as leuprolide acetate (LUPRON® and ELIGARD®), goserelin acetate, buserelin acetate and tripterelin; other anti-androgens such as flutamide, nilutamide and bicalutamide; and aromatase inhibitors that inhibit the enzyme aromatase, which regulates estrogen production in the adrenal glands, such as, for example, 4 (5)-imidazoles, aminoglutethimide, megestrol acetate (MEGASE®), exemestane (AROMASIN®), formestanie, fadrozole, vorozole (RIVISOR®), letrozole (FEMARA®), and anastrozole (ARIMIDEX®); bisphosphonates such as clodronate (for example, BONEFOS® or OSTAC®), etidronate (DIDROCAL®), NE-58095, zoledronic acid/zoledronate (ZOMETA®), alendronate (FOSAMAX®), pamidronate (AREDIA®), tiludronate (SKELID®), or risedronate (ACTONEL®); troxacitabine (a 1,3-dioxolane nucleoside cytosine analog); aptamers, described for example in U.S. Pat. No. 6,344,321, which is herein incorporated by reference in its entirety; anti HGF monoclonal antibodies (e.g., AV299 from Aveo, AMG102, from Amgen); truncated mTOR variants (e.g., CGEN241 from Compugen); protein kinase inhibitors that block mTOR induced pathways (e.g., ARQ197 from Arqule, XL880 from Exelexis, SGX523 from SGX Pharmaceuticals, MP470 from Supergen, PF2341066 from Pfizer); vaccines such as THERATOPE® vaccine and gene therapy vaccines, for example, ALLOVECTIN® vaccine, LEUVECTIN® vaccine, and VAXID® vaccine; topoisomerase 1 inhibitor (e.g., LURTOTECAN®); rmRH (e.g., ABARELIX®); lapatinib ditosylate (an ErbB-2 and EGFR dual tyrosine kinase small-molecule inhibitor also known as GW572016); COX-2 inhibitors such as celecoxib (CELEBREX®; 4-(5-(4-methylphenyl)-3-(trifluoromethyl)-1H-pyrazol-1-yl)benzenesulfonamide; and pharmaceutically acceptable salts, acids or derivatives of any of the above.

[0417] In some embodiments, cells described herein (e.g., cells modified using methods of the disclosure) are used in combination with one or more cancer treatment modalities that facilitate the induction of antibody dependent cellular cytotoxicity (ADCC) (see e.g., Janeway's Immunobiology by K. Murphy and C. weaver). In some embodiments, such a cancer treatment modality is an antibody. In some embodiments, such an antibody is Trastuzumab. In some embodiments, such an antibody is Rituximab. In some embodiments, such an antibody is Rituximab, Palivizumab, Infliximab, Trastuzumab, Alemtuzumab, Adalimumab, Ibritumomab tiuxetan, Omalizumab, Cetuximab, Bevacizumab, Natalizumab, Panitumumab, Ranibizumab, Certolizumab pegol, Ustekinumab, Canakinumab, Golimumab, Ofatumumab, Tocilizumab, Denosumab, Belimumab, Ipilimumab, Brentuximab vedotin, Pertuzumab, Trastuzumab emtansine, Obinutuzumab, Siltuximab, Ramucirumab, Vedolizumab, Blinatumomab, Nivolumab, Pembrolizumab, Idarucizumab, Necitumumab, Dinutuximab, Secukinumab, Mepolizumab, Alirocumab, Evolocumab, Daratumumab, Elotuzumab, Ixekizumab, Reslizumab, Olaratumab, Bezlotoxumab, Atezolizumab, Obiltoxaximab, Inotuzumab ozogamicin, Brodalumab, Guselkumab, Dupilumab, Sarilumab, Avelumab, Ocrelizumab, Emicizumab, Benralizumab, Gemtuzumab ozogamicin, Durvalumab, Burosumab, Lanadelumab, Mogamulizumab, Erenumab, Galcanezumab, Tildrakizumab, Cemiplimab, Emapalumab, Fremanezumab, Ibalizumab, Moxetumomab pasudodox, Ravulizumab, Romosozumab, Risankizumab, Polatuzumab vedotin, Brolucizumab, or any combination thereof (see e.g., Lu et al., Development of therapeutic antibodies for the treatment of diseases. Journal of Biomedical Science, 2020). In some embodiments, cells described herein (e.g., cells modified using methods of the disclosure) are used in combination with one or more cancer treatment modalities that facilitate the induction of antibody dependent cellular cytotoxicity (ADCC), wherein the cancer treatment modality is an antibody or appropriate fragment thereof targeting CD20, TNFα, HER2, CD52, IgE, EGFR, VEGF-A, ITGA4, CTLA-4, CD30, VEGFR2, a4B7 integrin, CD19, CD3, PD-1, GD2, CD38, SLAMF7, PDGFRa, PD-L1, CD22, CD33, IFNγ, CD79B, or any combination thereof.

[0418] In some embodiments, cells described herein are utilized in combination with checkpoint inhibitors. Examples of suitable combination therapy checkpoint inhibitors include, but are not limited to, antagonists of PD-1 (Pdcdl, CD279), PDL-1 (CD274), TIM-3 (Havcr2), TIGIT (WUCAM and Vstm3), LAG-3 (Lag3, CD223), CTLA-4 (Ctla4, CD152), 2B4 (CD244), 4-1BB (CD137), 4-1BBL (CD137L), A2aR, BATE, BTLA, CD39 (Entpdl), CD47, CD73 (NT5E), CD94, CD96, CD160, CD200, CD200R, CD274, CEACAMI, CSF-IR, Foxpl, GARP, HVEM, IDO, EDO, TDO, LAIR-1, MICA/B, NR4A2, MAFB, OCT-2 (Pou2f2), retinoic acid receptor alpha (Rara), TLR3, VISTA, NKG2A/HLA-E, inhibitory KIR (for example, 2DL1, 2DL2, 2DL3, 3DL1, and3DL2), or any suitable combination thereof.

[0419] In some embodiments, the antagonist inhibiting any of the above checkpoint molecules is an antibody. In some embodiments, the checkpoint inhibitory antibodies may be murine antibodies, human antibodies, humanized antibodies, a camel Ig, a shark heavychain-only antibody (VNAR), Ig NAR, chimeric antibodies, recombinant antibodies, or antibody fragments thereof. Non-limiting examples of antibody fragments include Fab, Fab′, F (ab)′2, F (ab)′3, Fv, single chain antigen binding fragments (scFv), (scFv) 2, disulfide stabilized Fv (dsFv), minibody, diabody, triabody, tetrabody, single-domain antigen binding fragments (sdAb, Nanobody), recombinant heavy-chain-only antibody (VHH), and other antibody fragments that maintain the binding specificity of the whole antibody, which may be more cost-effective to produce, more easily used, or more sensitive than the whole antibody. In some embodiments, the one, or two, or three, or more checkpoint inhibitors comprise at least one of atezolizumab (anti-PDL1 mAb), avelumab (anti-PDL1 mAb), durvalumab (anti-PDL1 mAb), tremelimumab (anti-CTLA4 mAb), ipilimumab (anti-CTLA4 mAb), IPH4102 (anti-KIR), IPH43 (anti-MICA), IPH33 (anti-TLR3), lirimumab (anti-KIR), monalizumab (anti-NKG2A), nivolumab (anti-PD1 mAb), pembrolizumab (anti-PD 1 mAb), and any derivatives, functional equivalents, or biosimilars thereof.

[0420] In some embodiments, the antagonist inhibiting any of the above checkpoint molecules is microRNA-based, as many miRNAs are found as regulators that control the expression of immune checkpoints (Dragomir et al., Cancer Biol Med. 2018, 15 (2): 103-115). In some embodiments, the checkpoint antagonistic miRNAs include, but are not limited to, miR-28, miR-15/16, miR-138, miR-342, miR-20b, miR-21, miR-130b, miR-34a, miR-197, miR-200c, miR-200, miR-17-5p, miR-570, miR-424, miR-155, miR-574-3p, miR-513, miR-29c, and/or any suitable combination thereof.

[0421] In some embodiments, cells described herein (e.g., cells modified using methods of the disclosure) are used in combination with one or more cancer treatment modalities such as exogenous interleukin (IL) dosing. In some embodiments, an exogenous IL provided to a patient is IL-15. In some embodiments, systemic IL-15 dosing when used in combination with cells described herein is reduced when compared to standard dosing concentrations (see e.g., Waldmann et al., IL-15 in the Combination Immunotherapy of Cancer. Front. Immunology, 2020).

[0422] Other compounds that are effective in treating cancer are known in the art and described herein that are suitable for use with the compositions and methods of the present disclosure as additional cancer treatment modalities are described, for example, in the “Physicians' Desk Reference, 62nd edition. Oradell, N.J.: Medical Economics Co., 2008”, Goodman & Gilman's “The Pharmacological Basis of Therapeutics, Eleventh Edition. McGraw-Hill, 2005”, “Remington: The Science and Practice of Pharmacy, 20th Edition. Baltimore, Md.: Lippincott Williams & Wilkins, 2000,” and “The Merck Index, Fourteenth Edition. Whitehouse Station, N.J.: Merck Research Laboratories, 2006”, incorporated herein by reference in relevant parts.

[0423] All publications, patents and patent applications cited herein, whether supra or infra, are hereby incorporated by reference in their entirety.

[0424] Throughout this specification, unless the context requires otherwise, the words “comprise”, “comprises” and “comprising” will be understood to imply the inclusion of a stated step or element or group of steps or elements but not the exclusion of any other step or element or group of steps or elements. By “consisting of is meant including, and limited to, whatever follows the phrase “consisting of:” Thus, the phrase “consisting of” indicates that the listed elements are required or mandatory, and that no other elements may be present. By “consisting essentially of” is meant including any elements listed after the phrase, and limited to other elements that do not interfere with or contribute to the activity or action specified in the disclosure for the listed elements. Thus, the phrase “consisting essentially” of indicates that the listed elements are required or mandatory, but that no other elements are optional and may or may not be present depending upon whether or not they affect the activity or action of the listed elements.

[0425] These and other changes can be made to the embodiments in light of the above-detailed description. In general, in the following claims, the terms used should not be construed to limit the claims to the specific embodiments disclosed in the specification and the claims, but should be construed to include all possible embodiments along with the full scope of equivalents to which such claims are entitled. Accordingly, the claims are not limited by the disclosure.

[0426] The various embodiments described above can be combined to provide further embodiments. All of the U.S. patents, U.S. patent application publications, U.S. patent applications, foreign patents, foreign patent applications and non-patent publications referred to in this specification and/or listed in the Application Data Sheet are incorporated herein by reference, in their entirety. The contents of database entries, e.g., NCBI nucleotide or protein database entries provided herein, are incorporated herein in their entirety. Where database entries are subject to change over time, the contents as of the filing date of the present application are incorporated herein by reference. Aspects of the embodiments can be modified, if necessary to employ concepts of the various patents, applications and publications to provide yet further embodiments.

[0427] The disclosure is further illustrated by the following examples. The examples are provided for illustrative purposes only. They are not to be construed as limiting the scope or content of the disclosure in any way.

### EXAMPLES

### Example 1: Screening of Guide RNAs for GAPDH

[0428] This example describes the screening of AsCpf1 (AsCas12a) guide RNAs that target the housekeeping gene GAPDH. GAPDH encodes Glyceraldehyde-3-Phosphate Dehydrogenase, an essential protein that catalyzes oxidative phosphorylation of glyceraldehyde-3-phosphate in the presence of inorganic phosphate and nicotinamide adenine dinucleotide (NAD), an important energy-yielding step in carbohydrate metabolism. The guide RNAs used in this analysis were all 41-mer RNA molecules with the following design: 5′-UAAUUUCUACUCUUGUAGAU-[21-mer targeting domain sequence]-3′ (SEQ ID NO: 90). For example, the guide RNA denoted RSQ22337 had the following sequence: 5′-UAAUUUCUACUCUUGUAGAUAUCUUCUAGGUAUGACAACGA-3′ (SEQ ID NO: 93) where the 21-mer targeting domain sequence is underlined. The guide RNAs with the targeting domain sequences shown in Table 19 were tested to determine how effective they were at editing GAPDH. Cas12a RNPs (RNPs having an engineered Cas12a (SEQ ID NO: 62)), containing each of these guide RNAs were transfected into iPSCs, and then editing levels were assayed three days after transfection (see e.g., Wong, K. G. et al. CryoPause: A New Method to Immediately Initiate Experiments after Cryopreservation of Pluripotent Stem Cells. Stem Cell Reports 9, 355-365 (2017)). The results are shown in FIG. 1 and FIG. 2. RSQ24570, RSQ24582, RSQ24589, RSQ24585, and RSQ22337 exhibited the greatest levels of measurable editing out of the GAPDH guides tested, editing approximately 70% or more of cells (about 92%, 89%, 88%, 87%, and 70%, respectively). It was observed that cells transfected with gR.NAs targeting certain exonic regions yielded much lower amounts of isolatable genomic DNA (gDNA) for analyzing editing efficiency (at day 3 after transfection) when compared to cells transfected with gRNAs targeting intronic regions, indicating that that RNPs with certain exon-targeting gRNAs were cytotoxic to the cells. This suggested that cells edited with gRNAs targeting exonic regions could result in significant cell death due to the introduction of indels within GAPDH leading to expression of a non-functional GAPDH protein or a protein with insufficient function. It was postulated that it might be possible to use a rescue plasmid to repair the gRNA-mediated cleavage site in GAPDH while also knocking in a gene cargo of interest in frame with the repaired GAPDH via HDR, thereby rescuing those cells in which GAPDH is repaired and the cargo of interest is successfully integrated (as shown in FIG. 1 and FIG. 2). Those transfected cells that are edited (the majority of transfected cells, if a highly effective RNA-guided nucleases is used) but do not undergo HDR repair of GAPDH and do not integrate the cargo of interest die over time because they do not have a functioning GAPDH gene. Those cells carrying the cargo of interest would have an advantage due to a fully functioning GAPDH gene as the cells grow and divide, and these cells would be selected for over time. The expected end result would be a population of cells with a very high rate of cargo knock-in within the GAPDH locus.

[0429] The data in FIG. 2 suggested that while Cas12a RNP comprising RSQ22337 resulted in an editing level of approximately 70% at 3 days post-transfection, it caused slightly higher levels of toxicity than other exonic guides (RSQ24570, RSQ24582, RSQ24589, and RSQ24585) (see FIG. 2, only about 3.9 ng/μL of gDNA was isolated from edited cells). Thus, the actual editing efficiency was very likely significantly higher than 70%, as many cells had already died by 3 days post-transfection due to the lack of available rescue constructs and NHEJ forming toxic indels. As a result, RSQ22337 was chosen for further testing.

TABLE 19
Guide RNA sequences

| SEQ | | gRNA targeting | |
|---|---|---|---|
| ID | | domain sequence | |
| NO: | Name | (RNA) | Location |
| 94 | RSQ22336 | UGAGCCAGCCACCAGAGGGCG | Intron 8 |
| 95 | RSQ22337 | AUCUUCUAGGUAUGACAACGA | Intron 8/ |
| | | | Exon 9 |
| | | | (cut site |
| | | | in exon 9) |
| 96 | RSQ22338 | GCUACAGCAACAGGGUGGUGG | Exon 9 |
| 97 | RSQ24559 | CCAUAAUUUCCUUUCAAGGUG | Intron 7 |
| 98 | RSQ24560 | CUUUCAAGGUGGGGAGGGAGG | Intron 7 |
| 99 | RSQ24561 | AAGGUGGGGAGGGAGGUAGAG | Intron 7 |
| 100 | RSQ24562 | GCAGACCACAGUCCAUGCCAU | Exon 8 |
| 101 | RSQ24563 | CAGACCACAGUCCAUGCCAUC | Exon 8 |
| 102 | RSQ24564 | CCGGAGGGGCCAUCCACAGUC | Exon 8 |
| 103 | RSQ24565 | UAGACGGCAGGUCAGGUCCAC | Exon 8 |
| 104 | RSQ24566 | CUAGACGGCAGGUCAGGUCCA | Exon 8 |
| 105 | RSQ24567 | UCUAGACGGCAGGUCAGGUCC | Exon 8 |
| 106 | RSQ24568 | GCAGGUUUUUCUAGACGGCAG | Exon 8 |
| 107 | RSQ24569 | UCAAGCUCAUUUCCUGGUAUG | Exon 8 |
| 108 | RSQ24570 | CUGGUAUGUGGCUGGGGCCAG | Exon 8/ |
| | | | Intron 8 |
| | | | (cut site |
| | | | in intron 8) |
| 109 | RSQ24571 | AGAGCCAGUCUCUGGCCCCAG | Intron 8 |
| 110 | RSQ24572 | AAGAGCCAGUCUCUGGCCCCA | Intron 8 |
| 111 | RSQ24573 | UAAGAGCCAGUCUCUGGCCCC | Intron 8 |
| 112 | RSQ24574 | CUGAGCCAGCCACCAGAGGGC | Intron 8 |
| 113 | RSQ24575 | UCUGAGCCAGCCACCAGAGGG | Intron 8 |
| 114 | RSQ24576 | CAUCUUCUAGGUAUGACAACG | Exon 9 |
| 115 | RSQ24578 | UUGAUGGUACAUGACAAGGUG | 1kb_downstream |
| 116 | RSQ24579 | GAGGCCCUACCCUCAGUCUGA | 1kb_downstream |
| 117 | RSQ24580 | CCUCUCCUCGCUCCAGUCCUA | 1kb_downstream |
| 118 | RSQ24581 | CUCUCCUCGCUCCAGUCCUAG | 1kb_downstream |
| 119 | RSQ24582 | GCCAACAGCAGAUAGCCUAGG | 1kb_downstream |
| 120 | RSQ24583 | UGUGCCCUCGUGUCUUAUCUG | 1kb_downstream |
| 121 | RSQ24584 | CCUAGAUGAAUCCUGCUUGAA | 1kb_downstream |
| 122 | RSQ24585 | GGUACUUGGUUUACCUAGAUG | 1kb_downstream |
| 123 | RSQ24586 | AGGUACUUGGUUUACCUAGAU | 1kb_downstream |
| 124 | RSQ24587 | AAACAUUAUAUAGUCCUUACC | 1kb_downstream |
| 125 | RSQ24588 | UAAACAUUAUAUAGUCCUUAC | 1kb_downstream |
| 126 | RSQ24589 | CCGAUUUUUAAACAUUAUAUA | 1kb_downstream |
| 127 | RSQ24590 | ACCGAUUUUUAAACAUUAUAU | 1kb_downstream |
| 128 | RSQ24591 | UACCGAUUUUUAAACAUUAUA | 1kb_downstream |
| 129 | RSQ24592 | AAAAUCGGUAAAAAUGCCCAC | 1kb_downstream |
| 130 | RSQ24593 | GAGGAAGAUGAACUGAGAUGU | 1kb_downstream |
| 131 | RSQ24594 | AGGAAGAUGAACUGAGAUGUG | 1kb_downstream |

### Example 2: Rescue of GAPDH Knock-Out Through Targeted Integration of Non-Viral DNA Templates

[0430] Because of manufacturing challenges associated with AAVs, the exemplary integration system depicted in FIG. 3 was assessed for ability to enable efficient knock-in using non-viral DNA templates. The following donor templates were assessed:

[0431] A linear nanoplasmid encoding GFP for insertion at the GAPDH locus (referred to herein as “dsDNA” or “linear dsDNA”):

ACGCGTATTGGGATGAAGACTGTGGATGGCCCCTCCGGGAAACTGTGGC
GTGATGGCCGCGGGGCTCTCCAGAACATCATCCCTGCCTCTACTGGCGC
TGCCAAGGCTGTGGGCAAGGTCATCCCTGAGCTGAACGGGAAGCTCACT
GGCATGGCCTTCCGTGTCCCCACTGCCAACGTGTCAGTGGTGGACCTGA
CCTGCCGTCTAGAAAAACCTGCCAAATATGATGACATCAAGAAGGTGGT
GAAGCAGGCGTCGGAGGGCCCCCTCAAGGGCATCCTGGGCTACACTGAG
CACCAGGTGGTCTCCTCTGACTTCAACAGCGACACCCACTCCTCCACCT
TTGACGCTGGGGCTGGCATTGCCCTCAACGACCACTTTGTCAAGCTCAT
TTCCTGGTATGTGGCTGGGGCCAGAGACTGGCTCTTAAAAAGTGCAGGG
TCTGGCGCCCTCTGGTGGCTGGCTCAGAAAAAGGGCCCTGACAACTCTT
TACATCTTCTAGGTATGACAACGAGTTCGGATATAGCAATAGAGTGGTC
GATCTGATGGCTCATATGGCTAGCAAAGAGGGAAGCGGAGCTACTAACT
TCAGCCTGCTGAAGCAGGCTGGAGACGTGGAGGAGAACCCTGGACCTAT
GGTGAGCAAGGGCGAGGAGCTGTTCACCGGGGTGGTGCCCATCCTGGTC
GAGCTGGACGGCGACGTAAACGGCCACAAGTTCAGCGTGTCCGGCGAGG
GCGAGGGCGATGCCACCTACGGCAAGCTGACCCTGAAGTTCATCTGCAC
CACCGGCAAGCTGCCCGTGCCCTGGCCCACCCTCGTGACCACCCTGACC
TACGGCGTGCAGTGCTTCAGCCGCTACCCCGACCACATGAAGCAGCACG
ACTTCTTCAAGTCCGCCATGCCCGAAGGCTACGTCCAGGAGCGCACCAT
CTTCTTCAAGGACGACGGCAACTACAAGACCCGCGCCGAGGTGAAGTTC
GAGGGCGACACCCTGGTGAACCGCATCGAGCTGAAGGGCATCGACTTCA
AGGAGGACGGCAACATCCTGGGGCACAAGCTGGAGTACAACTACAACAG
CCACAACGTCTATATCATGGCCGACAAGCAGAAGAACGGCATCAAGGTG
AACTTCAAGATCCGCCACAACATCGAGGACGGCAGCGTGCAGCTCGCCG
ACCACTACCAGCAGAACACCCCCATCGGCGACGGCCCCGTGCTGCTGCC
CGACAACCACTACCTGAGCACCCAGTCCGCCCTGAGCAAAGACCCCAAC
GAGAAGCGCGATCACATGGTCCTGCTGGAGTTCGTGACCGCCGCCGGGA
TCACTCTCGGCATGGACGAGCTGTACAAGTGAGCGGCCGCGTCGAGTCT
AGAGGGCCCGTTTAAACCCGCTGATCAGCCTCGACTGTGCCTTCTAGTT
GCCAGCCATCTGTTGTTTGCCCCTCCCCCGTGCCTTCCTTGACCCTGGA
AGGTGCCACTCCCACTGTCCTTTCCTAATAAAATGAGGAAATTGCATCG
CATTGTCTGAGTAGGTGTCATTCTATTCTGGGGGGTGGGGTGGGGCAGG
ACAGCAAGGGGGAGGATTGGGAAGACAATAGCAGGCATGCTGGGGATGC
GGTGGGCTCTATGGATTTGGCTACAGCAACAGGGTGGTGGACCTCATGG
CCCACATGGCCTCCAAGGAGTAAGACCCCTGGACCACCAGCCCCAGCAA
GAGCACAAGAGGAAGAGAGAGACCCTCACTGCTGGGGAGTCCCTGCCAC
ACTCAGTCCCCCACCACACTGAATCTCCCCTCCTCACAGTTGCCATGTA
GACCCCTTGAAGAGGGGAGGGGCCTAGGGAGCCGCACCTTGTCATGTAC
CATCAATAAAGTACCCTGTGCTCAACCAGTTACTTGTCCTGTCTTATTC
TAGGGTCTGGGGCAGAGGGGAGGGAAGCTGGGCTTGTGTCAAGGTGAGA
CATTCTTGCTGGGGAGGGACCTGGTATGTTCTCCTCAGACTGAGGGTAG
GGCCTCCAAACAGCCTTGCTTGCTTCGAGAACCATTTGCTTCCCGCTCA
GACGTCTTGAGTGCTACAGGAAGCTGGCACCACTACTTCAGAGAACAAG
GCCTTTTCCTCTCCTCGCTCCAGTATCCCAATGGCGCGCCGAGCTTGGC
TCGAGCTGGCTTGTTGTCCACAACCATTAAACCTTAAAAGCTTTAAAAG
CCTTATATATTCTTTTTTTTCTTATAAAACTTAAAACCTTAGAGGCTAT
TTAAGTTGCTGATTTATATTAATTTTATTGTTCAAACATGAGAGCTTAG
TACGTGAAACATGAGAGCTTAGTACATTAGCCATGAGAGCTTAGTACAT
TAGCCATGAGGGTTTAGTTCATTAAACATGAGAGCTTAGTACATTAAAC
ATGAGAGCTTAGTACATACTATCAACAGGTTGAACTGCTGATCTGTACA
GTAGAATTGGTAAAGAGAGTTGTGTAAAATATTGAGTTCGCACATCTTG
TTGTCTGATTATTGATTTTTGGCGAAACCATTTGATCATATGACAAGAT
GTGTATCTACCTTAACTTAATGATTTTGATAAAAATCATTAGGTACC

[0432] A linear single stranded DNA encoding GFP for insertion at the GAPDH locus (referred to herein as “ssDNA” or “linear ssDNA”):

GAAGACTGTGGATGGCCCCTCCGGGAAACTGTGGCGTGATGGCCGCGGG
GCTCTCCAGAACATCATCCCTGCCTCTACTGGCGCTGCCAAGGCTGTGG
GCAAGGTCATCCCTGAGCTGAACGGGAAGCTCACTGGCATGGCCTTCCG
TGTCCCCACTGCCAACGTGTCAGTGGTGGACCTGACCTGCCGTCTAGAA
AAACCTGCCAAATATGATGACATCAAGAAGGTGGTGAAGCAGGCGTCGG
AGGGCCCCCTCAAGGGCATCCTGGGCTACACTGAGCACCAGGTGGTCTC
CTCTGACTTCAACAGCGACACCCACTCCTCCACCTTTGACGCTGGGGCT
GGCATTGCCCTCAACGACCACTTTGTCAAGCTCATTTCCTGGTATGTGG
CTGGGGCCAGAGACTGGCTCTTAAAAAGTGCAGGGTCTGGCGCCCTCTG
GTGGCTGGCTCAGAAAAAGGGCCCTGACAACTCTTTACATCTTCTAGGT
ATGACAACGAGTTCGGATATAGCAATAGAGTGGTCGATCTGATGGCTCA
TATGGCTAGCAAAGAGGGAAGCGGAGCTACTAACTTCAGCCTGCTGAAG
CAGGCTGGAGACGTGGAGGAGAACCCTGGACCTATGGTGAGCAAGGGCG
AGGAGCTGTTCACCGGGGTGGTGCCCATCCTGGTCGAGCTGGACGGCGA
CGTAAACGGCCACAAGTTCAGCGTGTCCGGCGAGGGCGAGGGCGATGCC
ACCTACGGCAAGCTGACCCTGAAGTTCATCTGCACCACCGGCAAGCTGC
CCGTGCCCTGGCCCACCCTCGTGACCACCCTGACCTACGGCGTGCAGTG
CTTCAGCCGCTACCCCGACCACATGAAGCAGCACGACTTCTTCAAGTCC
GCCATGCCCGAAGGCTACGTCCAGGAGCGCACCATCTTCTTCAAGGACG
ACGGCAACTACAAGACCCGCGCCGAGGTGAAGTTCGAGGGCGACACCCT
GGTGAACCGCATCGAGCTGAAGGGCATCGACTTCAAGGAGGACGGCAAC
ATCCTGGGGCACAAGCTGGAGTACAACTACAACAGCCACAACGTCTATA
TCATGGCCGACAAGCAGAAGAACGGCATCAAGGTGAACTTCAAGATCCG
CCACAACATCGAGGACGGCAGCGTGCAGCTCGCCGACCACTACCAGCAG
AACACCCCCATCGGCGACGGCCCCGTGCTGCTGCCCGACAACCACTACC
TGAGCACCCAGTCCGCCCTGAGCAAAGACCCCAACGAGAAGCGCGATCA
CATGGTCCTGCTGGAGTTCGTGACCGCCGCCGGGATCACTCTCGGCATG
GACGAGCTGTACAAGTGAGCGGCCGCGTCGAGTCTAGAGGGCCCGTTTA
AACCCGCTGATCAGCCTCGACTGTGCCTTCTAGTTGCCAGCCATCTGTT
GTTTGCCCCTCCCCCGTGCCTTCCTTGACCCTGGAAGGTGCCACTCCCA
CTGTCCTTTCCTAATAAAATGAGGAAATTGCATCGCATTGTCTGAGTAG
GTGTCATTCTATTCTGGGGGGTGGGGTGGGGCAGGACAGCAAGGGGGAG
GATTGGGAAGACAATAGCAGGCATGCTGGGGATGCGGTGGGCTCTATGG
ATTTGGCTACAGCAACAGGGTGGTGGACCTCATGGCCCACATGGCCTCC
AAGGAGTAAGACCCCTGGACCACCAGCCCCAGCAAGAGCACAAGAGGAA
GAGAGAGACCCTCACTGCTGGGGAGTCCCTGCCACACTCAGTCCCCCAC
CACACTGAATCTCCCCTCCTCACAGTTGCCATGTAGACCCCTTGAAGAG
GGGAGGGGCCTAGGGAGCCGCACCTTGTCATGTACCATCAATAAAGTAC
CCTGTGCTCAACCAGTTACTTGTCCTGTCTTATTCTAGGGTCTGGGGCA
GAGGGGAGGGAAGCTGGGCTTGTGTCAAGGTGAGACATTCTTGCTGGGG
AGGGACCTGGTATGTTCTCCTCAGACTGAGGGTAGGGCCTCCAAACAGC
CTTGCTTGCTTCGAGAACCATTTGCTTCCCGCTCAGACGTCTTGAGTGC
TACAGGAAGCTGGCACCACTACTTCAGAGAACAAGGCCTTTTCCTCTCC
TCGCTCCAGT

[0433] An AAV expression plasmid encoding GFP for insertion at the GAPDH locus (referred to herein as “AAV” or “AAV6”):

AGATCTAGGAACCCCTAGTGATGGAGTTGGCCACTCCCTCTCTGCGCGC
TCGCTCGCTCACTGAGGCCGGGCGACCAAAGGTCGCCCGACGCCCGGGC
TTTGCCCGGGCGGCCTCAGTGAGCGAGCGAGCGCGCAGCTGCCTGCAGG
GGCGCCTGATGCGGTATTTTCTCCTTACGCATCTGTGCGGATCCCAATG
GCGCGCCGAGCTTGGCTCGAGCATGGTCATAGCTGTTTCCTGTGTGAAA
TTGTTATCCGCTCACAATTCCACACAACATACGAGCCGGAAGCATAAAG
TGTAAAGCCTGGGGTGCCTAATGAGTGAGCTAACTCACATTAATTGCGT
TGCGCTCACTGCCCGCTTTCCAGTCGGGAAACCTGTCGTGCCAGCTGCA
TTAATGAATCGGCCAACGCGCGGGGAGAGGCGGTTTGCGTATTGGGCGC
TCTTCCGCTTCCTCGCTCACTGACTCGCTGCGCTCGGTCGTTCGGCTGC
GGCGAGCGGTATCAGCTCACTCAAAGGCGGTAATACGGTTATCCACAGA
ATCAGGGGATAACGCAGGAAAGAACATGTGAGCAAAAGGCCAGCAAAAG
GCCAGGAACCGTAAAAAGGCCGCGTTGCTGGCGTTTTTCCATAGGCTCC
GCCCCCCTGACGAGCATCACAAAAATCGACGCTCAAGTCAGAGGTGGCG
AAACCCGACAGGACTATAAAGATACCAGGCGTTTCCCCCTGGAAGCTCC
CTCGTGCGCTCTCCTGTTCCGACCCTGCCGCTTACCGGATACCTGTCCG
CCTTTCTCCCTTCGGGAAGCGTGGCGCTTTCTCATAGCTCACGCTGTAG
GTATCTCAGTTCGGTGTAGGTCGTTCGCTCCAAGCTGGGCTGTGTGCAC
GAACCCCCCGTTCAGCCCGACCGCTGCGCCTTATCCGGTAACTATCGTC
TTGAGTCCAACCCGGTAAGACACGACTTATCGCCACTGGCAGCAGCCAC
TGGTAACAGGATTAGCAGAGCGAGGTATGTAGGCGGTGCTACAGAGTTC
TTGAAGTGGTGGCCTAACTACGGCTACACTAGAAGAACAGTATTTGGTA
TCTGCGCTCTGCTGAAGCCAGTTACCTTCGGAAAAAGAGTTGGTAGCTC
TTGATCCGGCAAACAAACCACCGCTGGTAGCGGTGGTTTTTTTGTTTGC
AAGCAGCAGATTACGCGCAGAAAAAAAGGATCTCAAGAAGATCCTTTGA
TCTTTTCTACGGGGTCTGACGCTCAGTGGAACGAAAACTCACGTTAAGG
GATTTTGGTCATGAGATTATCAAAAAGGATCTTCACCTAGATCCTTTTA
AATTAAAAATGAAGTTTTAAATCAATCTAAAGTATATATGAGTAAACTT
GGTCTGACAGTTAGAAAAACTCATCGAGCATCAAATGAAACTGCAATTT
ATTCATATCAGGATTATCAATACCATATTTTTGAAAAAGCCGTTTCTGT
AATGAAGGAGAAAACTCACCGAGGCAGTTCCATAGGATGGCAAGATCCT
GGTATCGGTCTGCGATTCCGACTCGTCCAACATCAATACAACCTATTAA
TTTCCCCTCGTCAAAAATAAGGTTATCAAGTGAGAAATCACCATGAGTG
ACGACTGAATCCGGTGAGAATGGCAAAAGTTTATGCATTTCTTTCCAGA
CTTGTTCAACAGGCCAGCCATTACGCTCGTCATCAAAATCACTCGCATC
AACCAAACCGTTATTCATTCGTGATTGCGCCTGAGCGAGACGAAATACG
CGATCGCTGTTAAAAGGACAATTACAAACAGGAATCGAATGCAACCGGC
GCAGGAACACTGCCAGCGCATCAACAATATTTTCACCTGAATCAGGATA
TTCTTCTAATACCTGGAATGCTGTTTTCCCAGGGATCGCAGTGGTGAGT
AACCATGCATCATCAGGAGTACGGATAAAATGCTTGATGGTCGGAAGAG
GCATAAATTCCGTCAGCCAGTTTAGTCTGACCATCTCATCTGTAACATC
ATTGGCAACGCTACCTTTGCCATGTTTCAGAAACAACTCTGGCGCATCG
GGCTTCCCATACAATCGATAGATTGTCGCACCTGATTGCCCGACATTAT
CGCGAGCCCATTTATACCCATATAAATCAGCATCCATGTTGGAATTTAA
TCGCGGCCTAGAGCAAGACGTTTCCCGTTGAATATGGCTCATACTCTTC
CTTTTTCAATATTATTGAAGCATTTATCAGGGTTATTGTCTCATGAGCG
GATACATATTTGAATGTATTTAGAAAAATAAACAAATAGGGGTTCCGCG
CACATTTCCCCGAAAAGTGCCACCTGACGTCTAAGAAACCATTATTATC
ATGACATTAACCTATAAAAATAGGCGTATCACGAGGCCCTTTCGTCTCG
CGCGTTTCGGTGATGACGGTGAAAACCTCTGACACATGCAGCTCCCGGA
GACGGTCACAGCTTGTCTGTAAGCGGATGCCGGGAGCAGACAAGCCCGT
CAGGGCGCGTCAGCGGGTGTTGGCGGGTGTCGGGGCTGGCTTAACTATG
CGGCATCAGAGCAGATTGTACTGAGAGTGCACCATATGCGGTGTGAAAT
ACCGCACAGATGCGTAAGGAGAAAATACCGCATCAGGCGCCATTCGCCA
TTCAGGCTGCGCAACTGTTGGGAAGGGCGATCGGTGCGGGCCTCTTCGC
TATTACGCCAGCTGGCGAAAGGGGGATGTGCTGCAAGGCGATTAAGTTG
GGTAACGCCAGGGTTTTCCCAGTCACGACGTTGTAAAACGACGGCCAGT
GAATTGAACTTGTTACAGAAGCCGGGGTTCAAAACACCAAATAATGCAC
TTGTACCTAGTCCTTCCCGGGTGCTCTGCAGACATTTCTCCAAGCGTAG
TCTGCAAACAACCTACATATGTAGAATTACCTATGCACATTTTTCATTT
AACAACCAAGAGCTACATTTGTAGCAAAATCTGGGTTGTAACTTAGCCT
ACAGCTGAAGCCTAAGAGATTCCGTCTGTGAGAAGAAATAACCCACCTC
TTTGGCCCCCCTCCCCAGGCAGGAAGCCAGGATGGTCCTTATATAAAGT
TGTGCTGTCCAATAGGTAACCACTAGCCACATATGGCTATTTAAATTTA
AATTAACTACAATTAAGAGAAATTAAAAATTCAATTCCTCAATTGCACC
TGCCAAATTTTAAGCACATAACAACCACATGTGGCTAGTAACTACTGTA
TTGGAGAGTGCAAGCGGAGATAGAACACTCTATTACTGCAGAAATTTCT
ATTGGATAGCACTTATAATAGTTTAGTGTAACTTAAAACTCCCTAGTTG
CCACAGTCATGATTTAGTAGTAATTTCATGGATTTCTCTACTGAGGTTA
GAATCTCTGCCATTAGAGACTGATAAATTTAAAGTTTGCAATTATCAAA
CTGGTGACAATTTAAGCCAGAATCAGGTAAATGTCCTCAGTTTTAACAG
CATTGGAATTTTCTGGGACTAGCTGTGTATCTATCCAGGATTCTTGAGA
ATGCCTGCCATTTTTCAACATAATGGATGTAAGGTATTACACATATACC
TGGGGATGGGGTGGTAGGTATAATTGCACAAGCATTGTGGAGAATGGTA
TCAAAGAGTGGCAGAACATCACAATCAAGGTTTTCCCTTTCTTTTACCT
TTGCTTTTTAAAAAGACAATATTTGCTGGACCTGATCTTATAACTCATA
AATGGGACACTGTATGTTCCTTTTTACCTCCTCTGTTTCTACTTAATTG
CACCCTATGAGGACTGCTTCCCTTACCTACCATAACCCCTTCCTTCACT
CATCCATATCTTTACTCTTCTTCACAACTCTGTAATATTGACCTTCTTT
ATGAACCTTTCCTGGAACAATCCCTCTTAAGTGCAAGCACTGTTATTAT
GCCTTCAATGTATTTAATATCCATGTATCTATTCTCTCTAATTTTGTCA
TTTTGTGTTCTCATGTATTTTCATTCATTATGTGTCCAACTTCCATGGA
TAACATGGTTACAACAAAAGATCCTACTTTATGACAATTATCTTCCTTG
GGTTTGTGGGACATAGAACAGTGCTCAGAGTAGGGGATCCAAGAACCCA
GGAGAATATATTAGCTAAGAAGATAACTTCCGTTTTTAAAAGTCCAAGA
TTCAGGAGATCAAAACCATCCTGGCTAACATAGTGAAACCCCGTCTCTT
CCAAAAATACAAAAAATTAGCCCGGCGTGGTGGCAGGCGCCTATAGTCC
CAGCTACACGGGAGGCTGAGGCAGGAGAATGGCGTGAACCGGGGAGGCG
GAGCTGGCAGTGAGCCGAGATCCCGCCACTGCACTCCAGCCTGGGCGAC
AGAGCGAGACTCCGTCTCAAAAAAAAAAAAAAAAAAAAAGTCCAAGATT
AAAAAAAAAAAAAAAAAAGGATGTCTGCTTTGTGAGTTTAGCATTGTCT
CCTTGTCATTCCAGAAATGAAATGGCAAATACATTTAAATCAGAACTAA
AAAGGGGAACAGGGTATAAAGGCTCAATTTAGTCACATCATTTCCGTTT
CTCACCCACCCCCTTTAAACCAGATGTTTGCCAATGCATTAACAATGCA
GATGTTTCCTGAAAGAAAGTTTAGTAACTCAAGCAGACACCTTATTTTC
TTTTCAAGCAGAAAAGACTATGAGATGGTGGTTGTGGTTGTTCCGGGAG
GGAGAAGATATAAATGATACACATTATTTCAAATCATTTCATGACCTCA
CTGCACACTTATAGTTATTGTACCTGTTGTCTTTTTGCTGTCAAGCCTA
GCTAAGATCATTTGGAATGTTCAAGATCACTCATACATGCATGTGCACA
CATACACATGCACATATGTTCACTCCCTATTTCATCCACATGAACTAAG
ATTACTGATGTGTACAGATTCAAAGCACTTTTATTCTTTTCCAAAGGCA
AGAAGCTGAGCTACTTTCCAGAATAGTTGTGAAAGACCCTGTCATACTT
CTGCATTGTTTCCTCCACACCACCTCCATCCAGTTCCTTATGAATGGTT
ACTGGTTTTCAAAAATATGAGATAAATTGAGTGTATAAAAGTCATTTTT
AGACAAAATGAAACAGGAAATGAAAGAAACCAGAATCTCTCCTCATTTG
TGGATGGGCCAGCTCCACCATGTCATGGTTAATCTGCAGGGAGGAAATA
CTAGATTTGATTGCAGATCAGACTGCAGCAAACCTGCTGTGACTAAGGC
ATCAAGAGAAAGCAAGCAACAGCTGGGGCTTCAGTGGTGAAAACATTAT
ATATCTAGCTTTGAAATATGAAATACTGTTTAGCAGTGTCACCTAGAAA
AGAGTGTTTCAAAATGCTGATGCTTCATAAGAACCTTTCTCTTCAGAGT
TGTTTCTTTTATCTTTCAAATTAGCCAGGGTGGGAAATAAAGTGATCAC
TTGGTGAAGAAATCTCACAAAGAAGAACATAGAGAGTTCACTTTCATCT
GGAGTAATGAACAGATTGAACAAACTAGAAATGGTTAGTCTGTTAAAGA
AAAGGTGTAGGTGAGCTGTTTGCAAGAGCCACAAGGGAAAGGGGAAGAC
AACTTCTTTGTGGACTTAAGGGTGAAAGTTGCAAGCAGGCAAGACGATT
CTGACCTCCATTAAGAAAGCCCTTTCCAACCAACAACCACTGGGTTGGT
TACGCAGGTTGGGCAGCATTGGGAGCAAATGTTGATTGAACAAATGTTT
GTCGGAATTGTTGACTTAAAGAGCTGTTCTGTCACTGGGGACAGCAGCG
GCTAGATAGCCCCATTCAGGGAGAGGGCATTTGTTCACCTGGCCAGAGA
TCAGAGCAGGCTAAGGGACTGCTGGGATCCTGTCCAGCTTTGAGACCCT
ACAGAGCCATGTTCACCTAGCACGTATCCCGTCTGCGGTCACGCTCATT
TCTTACCTTATTCCAGGGCTTTCACCTCAGCTTGCCAGGCTGGAGCCAA
GGGCCAACGCAGCCGCGCCTTGTTCGCGATGGTAGCTTCCCAGGAGCCC
CCTATGGTTCCGGAACGGCGCTGCCGGCCCCATCCTGTTTGCTACCTCC
TAAAGCCAAAGGCACTGGCGGGCCGGGCCAGCTTCTAAAGTCGCGCAAG
GTTAGAAGGTTCCGGACAGGAACGGCGTGAGGCCAATGGAAGGAGGTAC
TTCAGTTTCCCTCCAGATGCCCAGCGATGGGCTCAGAGCTCCTTGAGAA
CTCGGGAAAGGAAGCAGGGTCTCTGAAGAAATACTTCAGGAGTAGAAAG
AGGAAGCTAGAGGGTTAAATGCACTACACAGGAACAGAAATGAGTTTTT
CTTAGAGTTAGTATATGTCTAGAGGTGTAGTAAACTAAAACAAGTCTTG
AATTGCATACCGCCACGTAGGGAAGAAATGAAAACCTTTGAATATTAGT
GAAAAAAGGGAAACTGCAACGCCTGTATTACTAGATAGCTTTCATCAAC
AGCTCAAAACCGACAGATTTAAAGAAGCAACACCGCATTTTGGCTTTCT
AAAGCTTTAATTTGGTTTGGATCCCATGCCCATGACCCTGCCAGCTGAC
AATTCTAAGCATGCGCAAACTGGCCCCAAAAATTCCTCCCACATTTCCG
AAGAACTATTTGGCCCTTTATGTGAAGTACCTGGTTTTTCCATTTTCTG
TTTTACCATAGGCCTCAGTTCGGTGTGTGGCGTATTTATTGGGATGGTT
CCTGGCCTTTTGCTGGCCTTTTGCTCACATGTCCTGCAGGCAGCTGCGC
GCTCGCTCGCTCACTGAGGCCGCCCGGGCAAAGCCCGGGCGTCGGGCGA
CCTTTGGTCGCCCGGCCTCAGTGAGCGAGCGAGCGCGCAGAGAGGGAGT
GGCCAACTCCATCACTAGGGGTTCCTGTCGACGAAGACTGTGGATGGCC
CCTCCGGGAAACTGTGGCGTGATGGCCGCGGGGCTCTCCAGAACATCAT
CCCTGCCTCTACTGGCGCTGCCAAGGCTGTGGGCAAGGTCATCCCTGAG
CTGAACGGGAAGCTCACTGGCATGGCCTTCCGTGTCCCCACTGCCAACG
TGTCAGTGGTGGACCTGACCTGCCGTCTAGAAAAACCTGCCAAATATGA
TGACATCAAGAAGGTGGTGAAGCAGGCGTCGGAGGGCCCCCTCAAGGGC
ATCCTGGGCTACACTGAGCACCAGGTGGTCTCCTCTGACTTCAACAGCG
ACACCCACTCCTCCACCTTTGACGCTGGGGCTGGCATTGCCCTCAACGA
CCACTTTGTCAAGCTCATTTCCTGGTATGTGGCTGGGGCCAGAGACTGG
CTCTTAAAAAGTGCAGGGTCTGGCGCCCTCTGGTGGCTGGCTCAGAAAA
AGGGCCCTGACAACTCTTTACATCTTCTAGGTATGACAACGAGTTCGGA
TATAGCAATAGAGTGGTCGATCTGATGGCTCATATGGCTAGCAAAGAGG
GAAGCGGAGCTACTAACTTCAGCCTGCTGAAGCAGGCTGGAGACGTGGA
GGAGAACCCTGGACCTATGGTGAGCAAGGGCGAGGAGCTGTTCACCGGG
GTGGTGCCCATCCTGGTCGAGCTGGACGGCGACGTAAACGGCCACAAGT
TCAGCGTGTCCGGCGAGGGCGAGGGCGATGCCACCTACGGCAAGCTGAC
CCTGAAGTTCATCTGCACCACCGGCAAGCTGCCCGTGCCCTGGCCCACC
CTCGTGACCACCCTGACCTACGGCGTGCAGTGCTTCAGCCGCTACCCCG
ACCACATGAAGCAGCACGACTTCTTCAAGTCCGCCATGCCCGAAGGCTA
CGTCCAGGAGCGCACCATCTTCTTCAAGGACGACGGCAACTACAAGACC
CGCGCCGAGGTGAAGTTCGAGGGCGACACCCTGGTGAACCGCATCGAGC
TGAAGGGCATCGACTTCAAGGAGGACGGCAACATCCTGGGGCACAAGCT
GGAGTACAACTACAACAGCCACAACGTCTATATCATGGCCGACAAGCAG
AAGAACGGCATCAAGGTGAACTTCAAGATCCGCCACAACATCGAGGACG
GCAGCGTGCAGCTCGCCGACCACTACCAGCAGAACACCCCCATCGGCGA
CGGCCCCGTGCTGCTGCCCGACAACCACTACCTGAGCACCCAGTCCGCC
CTGAGCAAAGACCCCAACGAGAAGCGCGATCACATGGTCCTGCTGGAGT
TCGTGACCGCCGCCGGGATCACTCTCGGCATGGACGAGCTGTACAAGTG
AGCGGCCGCGTCGAGTCTAGAGGGCCCGTTTAAACCCGCTGATCAGCCT
CGACTGTGCCTTCTAGTTGCCAGCCATCTGTTGTTTGCCCCTCCCCCGT
GCCTTCCTTGACCCTGGAAGGTGCCACTCCCACTGTCCTTTCCTAATAA
AATGAGGAAATTGCATCGCATTGTCTGAGTAGGTGTCATTCTATTCTGG
GGGGTGGGGTGGGGCAGGACAGCAAGGGGGAGGATTGGGAAGACAATAG
CAGGCATGCTGGGGATGCGGTGGGCTCTATGGATTTGGCTACAGCAACA
GGGTGGTGGACCTCATGGCCCACATGGCCTCCAAGGAGTAAGACCCCTG
GACCACCAGCCCCAGCAAGAGCACAAGAGGAAGAGAGAGACCCTCACTG
CTGGGGAGTCCCTGCCACACTCAGTCCCCCACCACACTGAATCTCCCCT
CCTCACAGTTGCCATGTAGACCCCTTGAAGAGGGGAGGGGCCTAGGGAG
CCGCACCTTGTCATGTACCATCAATAAAGTACCCTGTGCTCAACCAGTT
ACTTGTCCTGTCTTATTCTAGGGTCTGGGGCAGAGGGGAGGGAAGCTGG
GCTTGTGTCAAGGTGAGACATTCTTGCTGGGGAGGGACCTGGTATGTTC
TCCTCAGACTGAGGGTAGGGCCTCCAAACAGCCTTGCTTGCTTCGAGAA
CCATTTGCTTCCCGCTCAGACGTCTTGAGTGCTACAGGAAGCTGGCACC
ACTACTTCAGAGAACAAGGCCTTTTCCTCTCCTCGCTCCAGT

[0434] A circular dsDNA encoding GFP for insertion at the GAPDH locus (referred to herein as “Circular dsDNA”):

ACGCGTATTGGGATGAAGACTGTGGATGGCCCCTCCGGGAAACTGTGGC
GTGATGGCCGCGGGGCTCTCCAGAACATCATCCCTGCCTCTACTGGCGC
TGCCAAGGCTGTGGGCAAGGTCATCCCTGAGCTGAACGGGAAGCTCACT
GGCATGGCCTTCCGTGTCCCCACTGCCAACGTGTCAGTGGTGGACCTGA
CCTGCCGTCTAGAAAAACCTGCCAAATATGATGACATCAAGAAGGTGGT
GAAGCAGGCGTCGGAGGGCCCCCTCAAGGGCATCCTGGGCTACACTGAG
CACCAGGTGGTCTCCTCTGACTTCAACAGCGACACCCACTCCTCCACCT
TTGACGCTGGGGCTGGCATTGCCCTCAACGACCACTTTGTCAAGCTCAT
TTCCTGGTATGTGGCTGGGGCCAGAGACTGGCTCTTAAAAAGTGCAGGG
TCTGGCGCCCTCTGGTGGCTGGCTCAGAAAAAGGGCCCTGACAACTCTT
TACATCTTCTAGGTATGACAACGAGTTCGGATATAGCAATAGAGTGGTC
GATCTGATGGCTCATATGGCTAGCAAAGAGGGAAGCGGAGCTACTAACT
TCAGCCTGCTGAAGCAGGCTGGAGACGTGGAGGAGAACCCTGGACCTAT
GGTGAGCAAGGGCGAGGAGCTGTTCACCGGGGTGGTGCCCATCCTGGTC
GAGCTGGACGGCGACGTAAACGGCCACAAGTTCAGCGTGTCCGGCGAGG
GCGAGGGCGATGCCACCTACGGCAAGCTGACCCTGAAGTTCATCTGCAC
CACCGGCAAGCTGCCCGTGCCCTGGCCCACCCTCGTGACCACCCTGACC
TACGGCGTGCAGTGCTTCAGCCGCTACCCCGACCACATGAAGCAGCACG
ACTTCTTCAAGTCCGCCATGCCCGAAGGCTACGTCCAGGAGCGCACCAT
CTTCTTCAAGGACGACGGCAACTACAAGACCCGCGCCGAGGTGAAGTTC
GAGGGCGACACCCTGGTGAACCGCATCGAGCTGAAGGGCATCGACTTCA
AGGAGGACGGCAACATCCTGGGGCACAAGCTGGAGTACAACTACAACAG
CCACAACGTCTATATCATGGCCGACAAGCAGAAGAACGGCATCAAGGTG
AACTTCAAGATCCGCCACAACATCGAGGACGGCAGCGTGCAGCTCGCCG
ACCACTACCAGCAGAACACCCCCATCGGCGACGGCCCCGTGCTGCTGCC
CGACAACCACTACCTGAGCACCCAGTCCGCCCTGAGCAAAGACCCCAAC
GAGAAGCGCGATCACATGGTCCTGCTGGAGTTCGTGACCGCCGCCGGGA
TCACTCTCGGCATGGACGAGCTGTACAAGTGAGCGGCCGCGTCGAGTCT
AGAGGGCCCGTTTAAACCCGCTGATCAGCCTCGACTGTGCCTTCTAGTT
GCCAGCCATCTGTTGTTTGCCCCTCCCCCGTGCCTTCCTTGACCCTGGA
AGGTGCCACTCCCACTGTCCTTTCCTAATAAAATGAGGAAATTGCATCG
CATTGTCTGAGTAGGTGTCATTCTATTCTGGGGGGTGGGGGGGGCAGGA
CAGCAAGGGGGAGGATTGGGAAGACAATAGCAGGCATGCTGGGGATGCG
GTGGGCTCTATGGATTTGGCTACAGCAACAGGGTGGTGGACCTCATGGC
CCACATGGCCTCCAAGGAGTAAGACCCCTGGACCACCAGCCCCAGCAAG
AGCACAAGAGGAAGAGAGAGACCCTCACTGCTGGGGAGTCCCTGCCACA
CTCAGTCCCCCACCACACTGAATCTCCCCTCCTCACAGTTGCCATGTAG
ACCCCTTGAAGAGGGGAGGGGCCTAGGGAGCCGCACCTTGTCATGTACC
ATCAATAAAGTACCCTGTGCTCAACCAGTTACTTGTCCTGTCTTATTCT
AGGGTCTGGGGCAGAGGGGAGGGAAGCTGGGCTTGTGTCAAGGTGAGAC
ATTCTTGCTGGGGAGGGACCTGGTATGTTCTCCTCAGACTGAGGGTAGG
GCCTCCAAACAGCCTTGCTTGCTTCGAGAACCATTTGCTTCCCGCTCAG
ACGTCTTGAGTGCTACAGGAAGCTGGCACCACTACTTCAGAGAACAAGG
CCTTTTCCTCTCCTCGCTCCAGTATCCCAATGGCGCGCCGAGCTTGGCT
CGAGCTGGCTTGTTGTCCACAACCATTAAACCTTAAAAGCTTTAAAAGC
CTTATATATTCTTTTTTTTCTTATAAAACTTAAAACCTTAGAGGCTATT
TAAGTTGCTGATTTATATTAATTTTATTGTTCAAACATGAGAGCTTAGT
ACGTGAAACATGAGAGCTTAGTACATTAGCCATGAGAGCTTAGTACATT
AGCCATGAGGGTTTAGTTCATTAAACATGAGAGCTTAGTACATTAAACA
TGAGAGCTTAGTACATACTATCAACAGGTTGAACTGCTGATCTGTACAG
TAGAATTGGTAAAGAGAGTTGTGTAAAATATTGAGTTCGCACATCTTGT
TGTCTGATTATTGATTTTTGGCGAAACCATTTGATCATATGACAAGATG
TGTATCTACCTTAACTTAATGATTTTGATAAAAATCATTAGGTACC

[0435] A close-ended linear dsDNA encoding GFP for insertion at the GAPDH locus (referred to herein as “close-ended linear dsDNA”):

GAAGACTGTGGATGGCCCCTCCGGGAAACTGTGGCGTGATGGCCGCGGG
GCTCTCCAGAACATCATCCCTGCCTCTACTGGCGCTGCCAAGGCTGTGG
GCAAGGTCATCCCTGAGCTGAACGGGAAGCTCACTGGCATGGCCTTCCG
TGTCCCCACTGCCAACGTGTCAGTGGTGGACCTGACCTGCCGTCTAGAA
AAACCTGCCAAATATGATGACATCAAGAAGGTGGTGAAGCAGGCGTCGG
AGGGCCCCCTCAAGGGCATCCTGGGCTACACTGAGCACCAGGTGGTCTC
CTCTGACTTCAACAGCGACACCCACTCCTCCACCTTTGACGCTGGGGCT
GGCATTGCCCTCAACGACCACTTTGTCAAGCTCATTTCCTGGTATGTGG
CTGGGGCCAGAGACTGGCTCTTAAAAAGTGCAGGGTCTGGCGCCCTCTG
GTGGCTGGCTCAGAAAAAGGGCCCTGACAACTCTTTACATCTTCTAGGT
ATGACAACGAGTTCGGATATAGCAATAGAGTGGTCGATCTGATGGCTCA
TATGGCTAGCAAAGAGGGAAGCGGAGCTACTAACTTCAGCCTGCTGAAG
CAGGCTGGAGACGTGGAGGAGAACCCTGGACCTATGGTGAGCAAGGGCG
AGGAGCTGTTCACCGGGGTGGTGCCCATCCTGGTCGAGCTGGACGGCGA
CGTAAACGGCCACAAGTTCAGCGTGTCCGGCGAGGGCGAGGGCGATGCC
ACCTACGGCAAGCTGACCCTGAAGTTCATCTGCACCACCGGCAAGCTGC
CCGTGCCCTGGCCCACCCTCGTGACCACCCTGACCTACGGCGTGCAGTG
CTTCAGCCGCTACCCCGACCACATGAAGCAGCACGACTTCTTCAAGTCC
GCCATGCCCGAAGGCTACGTCCAGGAGCGCACCATCTTCTTCAAGGACG
ACGGCAACTACAAGACCCGCGCCGAGGTGAAGTTCGAGGGCGACACCCT
GGTGAACCGCATCGAGCTGAAGGGCATCGACTTCAAGGAGGACGGCAAC
ATCCTGGGGCACAAGCTGGAGTACAACTACAACAGCCACAACGTCTATA
TCATGGCCGACAAGCAGAAGAACGGCATCAAGGTGAACTTCAAGATCCG
CCACAACATCGAGGACGGCAGCGTGCAGCTCGCCGACCACTACCAGCAG
AACACCCCCATCGGCGACGGCCCCGTGCTGCTGCCCGACAACCACTACC
TGAGCACCCAGTCCGCCCTGAGCAAAGACCCCAACGAGAAGCGCGATCA
CATGGTCCTGCTGGAGTTCGTGACCGCCGCCGGGATCACTCTCGGCATG
GACGAGCTGTACAAGTGAGCGGCCGCGTCGAGTCTAGAGGGCCCGTTTA
AACCCGCTGATCAGCCTCGACTGTGCCTTCTAGTTGCCAGCCATCTGTT
GTTTGCCCCTCCCCCGTGCCTTCCTTGACCCTGGAAGGTGCCACTCCCA
CTGTCCTTTCCTAATAAAATGAGGAAATTGCATCGCATTGTCTGAGTAG
GTGTCATTCTATTCTGGGGGGTGGGGTGGGGCAGGACAGCAAGGGGGAG
GATTGGGAAGACAATAGCAGGCATGCTGGGGATGCGGTGGGCTCTATGG
ATTTGGCTACAGCAACAGGGTGGTGGACCTCATGGCCCACATGGCCTCC
AAGGAGTAAGACCCCTGGACCACCAGCCCCAGCAAGAGCACAAGAGGAA
GAGAGAGACCCTCACTGCTGGGGAGTCCCTGCCACACTCAGTCCCCCAC
CACACTGAATCTCCCCTCCTCACAGTTGCCATGTAGACCCCTTGAAGAG
GGGAGGGGCCTAGGGAGCCGCACCTTGTCATGTACCATCAATAAAGTAC
CCTGTGCTCAACCAGTTACTTGTCCTGTCTTATTCTAGGGTCTGGGGCA
GAGGGGAGGGAAGCTGGGCTTGTGTCAAGGTGAGACATTCTTGCTGGGG
AGGGACCTGGTATGTTCTCCTCAGACTGAGGGTAGGGCCTCCAAACAGC
CTTGCTTGCTTCGAGAACCATTTGCTTCCCGCTCAGACGTCTTGAGTGC
TACAGGAAGCTGGCACCACTACTTCAGAGAACAAGGCCTTTTCCTCTCC
TCGCTCCAGT

[0436] A linear dsDNA encoding CD19-CAR for insertion at the GAPDH locus:

tcgaggaattcctggcttgttgtccacaaccattaaaccttaaaagctt
taaaagccttatatattcttttttttcttataaaacttaaaaccttaga
ggctatttaagttgctgatttatattaattttattgttcaaacatgaga
gcttagtacgtgaaacatgagagcttagtacattagccatgagagctta
gtacattagccatgagggtttagttcattaaacatgagagcttagtaca
ttaaacatgagagcttagtacatactatcaacaggttgaactgctgatc
tgtacagtagaattggtaaagagagttgtgtaaaatattgagttcgcac
atcttgttgtctgattattgatttttggcgaaaccatttgatcatatga
caagatgtgtatctaccttaacttaatgattttgataaaaatcattagg
taccgaattcacgcgtattgggatgaagactgtggatggcccctccggg
aaactgtggcgtgatggccgcggggctctccagaacatcatccctgcct
ctactggcgctgccaaggctgtgggcaaggtcatccctgagctgaacgg
gaagctcactggcatggccttccgtgtccccactgccaacgtgtcagtg
gtggacctgacctgccgtctagaaaaacctgccaaatatgatgacatca
agaaggtggtgaagcaggcgtcggagggccccctcaagggcatcctggg
ctacactgagcaccaggtggtctcctctgacttcaacagcgacacccac
tcctccacctttgacgctggggctggcattgccctcaacgaccactttg
tcaagctcatttcctggtatgtggctggggccagagactggctcttaaa
aagtgcagggtctggcgccctctggtggctggctcagaaaaagggccct
gacaactctttacatcttctaggtatgacaacgagttcggatatagcaa
tagagtggtcgatctgatggctcatatggctagcaaagagggaagcgga
gctactaacttcagcctgctgaagcaggctggagacgtggaggagaacc
ctggacctatgcttctcctggtgacaagccttctgctctgtgagttacc
acacccagcattcctcctgatcccagacatccagatgacacagactaca
tcctccctgtctgcctctctgggagacagagtcaccatcagttgcaggg
caagtcaggacattagtaaatatttaaattggtatcagcagaaaccaga
tggaactgttaaactcctgatctaccatacatcaagattacactcagga
gtcccatcaaggttcagtggcagtgggtctggaacagattattctctca
ccattagcaacctggagcaagaagatattgccacttacttttgccaaca
gggtaatacgcttccgtacacgttcggaggggggactaagttggaaata
acaggctccacctctggatccggcaagcccggatctggcgagggatcca
ccaagggcgaggtgaaactgcaggagtcaggacctggcctggtggcgcc
ctcacagagcctgtccgtcacatgcactgtctcaggggtctcattaccc
gactatggtgtaagctggattcgccagcctccacgaaagggtctggagt
ggctgggagtaatatggggtagtgaaaccacatactataattcagctct
caaatccagactgaccatcatcaaggacaactccaagagccaagttttc
ttaaaaatgaacagtctgcaaactgatgacacagccatttactactgtg
ccaaacattattactacggtggtagctatgctatggactactggggtca
aggaacctcagtcaccgtctcctcagcggccgcaattgaagttatgtat
cctcctccttacctagacaatgagaagagcaatggaaccattatccatg
tgaaagggaaacacctttgtccaagtcccctatttcccggaccttctaa
gcccttttgggtgctggtggtggttgggggagtcctggcttgctatagc
ttgctagtaacagtggcctttattattttctgggtgaggagtaagagga
gcaggctcctgcacagtgactacatgaacatgactccccgccgccccgg
gcccacccgcaagcattaccagccctatgccccaccacgcgacttcgca
gcctatcgctccagagtgaagttcagcaggagcgcagacgcccccgcgt
accagcagggccagaaccagctctataacgagctcaatctaggacgaag
agaggagtacgatgttttggacaagagacgtggccgggaccctgagatg
gggggaaagccgagaaggaagaaccctcaggaaggcctgtacaatgaac
tgcagaaagataagatggcggaggcctacagtgagattgggatgaaagg
cgagcgccggaggggcaaggggcacgatggcctttaccagggtctcagt
acagccaccaaggacacctacgacgcccttcacatgcaggccctgcccc
ctcgctaagcggccgcgtcgagtctagagggcccgtttaaacccgctga
tcagcctcgactgtgccttctagttgccagccatctgttgtttgcccct
cccccgtgccttccttgaccctggaaggtgccactcccactgtcctttc
ctaataaaatgaggaaattgcatcgcattgtctgagtaggtgtcattct
attctggggggtggggggggcaggacagcaagggggaggattgggaaga
caatagcaggcatgctggggatgcggtgggctctatggatttggctaca
gcaacagggtggtggacctcatggcccacatggcctccaaggagtaaga
cccctggaccaccagccccagcaagagcacaagaggaagagagagaccc
tcactgctggggagtccctgccacactcagtcccccaccacactgaatc
tcccctcctcacagttgccatgtagaccccttgaagaggggaggggcct
agggagccgcaccttgtcatgtaccatcaataaagtaccctgtgctcaa
ccagttacttgtcctgtcttattctagggtctggggcagaggggaggga
agctgggcttgtgtcaaggtgagacattcttgctggggagggacctggt
atgttctcctcagactgagggtagggcctccaaacagccttgcttgctt
cgagaaccatttgcttcccgctcagacgtcttgagtgctacaggaagct
ggcaccactacttcagagaacaaggccttttcctctcctcgctccagta
tcccaatggcgcgccgagcttggc

[0437] A linear dsDNA encoding EGFR-CAR for insertion at the GAPDH locus:

tcgaggaattcctggcttgttgtccacaaccattaaaccttaaaagctt
taaaagccttatatattcttttttttcttataaaacttaaaaccttaga
ggctatttaagttgctgatttatattaattttattgttcaaacatgaga
gcttagtacgtgaaacatgagagcttagtacattagccatgagagctta
gtacattagccatgagggtttagttcattaaacatgagagcttagtaca
ttaaacatgagagcttagtacatactatcaacaggttgaactgctgatc
tgtacagtagaattggtaaagagagttgtgtaaaatattgagttcgcac
atcttgttgtctgattattgatttttggcgaaaccatttgatcatatga
caagatgtgtatctaccttaacttaatgattttgataaaaatcattagg
taccgaattcacgcgtattgggatgaagactgtggatggcccctccggg
aaactgtggcgtgatggccgcggggctctccagaacatcatccctgcct
ctactggcgctgccaaggctgtgggcaaggtcatccctgagctgaacgg
gaagctcactggcatggccttccgtgtccccactgccaacgtgtcagtg
gtggacctgacctgccgtctagaaaaacctgccaaatatgatgacatca
agaaggtggtgaagcaggcgtcggagggccccctcaagggcatcctggg
ctacactgagcaccaggtggtctcctctgacttcaacagcgacacccac
tcctccacctttgacgctggggctggcattgccctcaacgaccactttg
tcaagctcatttcctggtatgtggctggggccagagactggctcttaaa
aagtgcagggtctggcgccctctggtggctggctcagaaaaagggccct
gacaactctttacatcttctaggtatgacaacgagttcggatatagcaa
tagagtggtcgatctgatggctcatatggctagcaaagagggaagcgga
gctactaacttcagcctgctgaagcaggctggagacgtggaggagaacc
ctggacctatggcactccccgtcaccgcccttctcttgcccctcgccct
gctgctgcatgctgccaggcccatggacgaagtgcagctcgtggagtcc
ggtggaggactcgtccaaccgggcggatcccttcgcttgtcctgcgccg
catcaggcttcagcttcaccaactatggcgtccactgggtcagacaggc
ccccggaaagggactggaatgggtgtccgtgatctggagcggcgggaac
accgactacaacacctccgtgaagggccggttcactattagccgcgaca
actccaagaacactctgtacctccaaatgaactccctgagggccgaaga
tactgctgtgtactattgcgcgagagccctgacctactacgactacgag
ttcgcgtactggggccaggggactctcgtgaccgtgtccagcggtggtg
gaggttccggaggcggaggttctggtggcgggggatcagaaatcgtgct
gactcagtcccctgcgaccttgtccctgagccctggagaacgggccacc
ctgagctgtagagccagccagagcatcgggacaaatattcactggtacc
agcagaaacccggacaagcaccacggctgctgatctactacgcctccga
gtcgatttccggaatcccggctcgcttttcggggtctggatcgggaacg
gacttcactctgaccatctcgtcgctggaacccgaggatttcgccgtgt
actactgccaacagaacaacaattggccgaccacgttcggccagggcac
caagctcgagattaagggatcactggaagcggccgcaaccacaacacct
gctccaaggccccccacacccgctccaactatagccagccaaccattga
gcctcagacctgaagcttgcaggcccgcagcaggaggcgccgtccatac
gcgaggcctggacttcgcgtgtgatatttatatttgggcccctttggcc
ggaacatgtggggtgttgcttctctcccttgtgatcactctgtattgta
agcgcgggagaaagaagctcctgtacatcttcaagcagccttttatgcg
acctgtgcaaaccactcaggaagaagatgggtgttcatgccgcttcccc
gaggaggaagaaggagggtgtgaactgagggtgaaattttctagaagcg
ccgatgctcccgcatatcagcagggtcagaatcagctctacaatgaatt
gaatctcggcaggcgagaagagtacgatgttctggacaagagacggggc
agggatcccgagatggggggaaagccccggagaaaaaatcctcaggagg
ggttgtacaatgagctgcagaaggacaagatggctgaagcctatagcga
gatcggaatgaaaggcgaaagacgcagaggcaaggggcatgacggtctg
taccagggtctctctacagccaccaaggacacttatgatgcgttgcata
tgcaagccttgccaccccgctaagcggccgcgtcgagtctagagggccc
gtttaaacccgctgatcagcctcgactgtgccttctagttgccagccat
ctgttgtttgcccctcccccgtgccttccttgaccctggaaggtgccac
tcccactgtcctttcctaataaaatgaggaaattgcatcgcattgtctg
agtaggtgtcattctattctggggggtggggggggcaggacagcaaggg
ggaggattgggaagacaatagcaggcatgctggggatgcggtgggctct
atggatttggctacagcaacagggtggtggacctcatggcccacatggc
ctccaaggagtaagacccctggaccaccagccccagcaagagcacaaga
ggaagagagagaccctcactgctggggagtccctgccacactcagtccc
ccaccacactgaatctcccctcctcacagttgccatgtagaccccttga
agaggggggggcctagggagccgcaccttgtcatgtaccatcaataaag
taccctgtgctcaaccagttacttgtcctgtcttattctagggtctggg
gcagaggggagggaagctgggcttgtgtcaaggtgagacattcttgctg
gggagggacctggtatgttctcctcagactgagggtagggcctccaaac
agccttgcttgcttcgagaaccatttgcttcccgctcagacgtcttgag
tgctacaggaagctggcaccactacttcagagaacaaggccttttcctc
tcctcgctccagtatcccaatggcgcgccgagcttggc

[0438] T cells isolated from peripheral blood mononuclear cells and frozen in cryopreservation media were thawed in a bead bath as known in the art. For electroporation, 0.25×10⁶ T cells were resuspended in 20 μL Lonza P2 or P3 buffer (for AAV6 and non-viral donors, respectively) per well in a Lonza 96-well cuvette and electroporated with a donor template and RNP comprising gRNA RSQ22337 (SEQ ID NO: 95) and Cas12a (SEQ ID NO: 62) using a Lonza 4D nucleofection system. For AAV6 experiments, 1.25×10¹⁰ VG/mL virus was added to the cells. Appropriate media was added to cells immediately after electroporation and cells were allowed to recover. T cells were sorted using flow cytometry seven days post electroporation to determine editing and knock-in efficiency.

[0439] When comparing GFP KI efficiencies (FIG. 4B), day 7 viability (FIG. 4C), and fold-expansion with these different DNA donor templates, minimal differences were seen between ssDNA templates and AAV6, with linear dsDNA showing slightly lower viability and expansion on day 7 compared to ssDNA, AAV6, and mock-treated T cells. The use of circular dsDNA donor templates and closed-ended linear dsDNA templates were also assessed. As shown in FIG. 5A and FIG. 5B, all donor template formats showed efficiencies >90%, other than circular dsDNA (78%). To examine the fidelity of KI with these different donor templates, targeted Oxford Nanopore long-read sequencing was conducted at the GAPDH locus (FIG. 5C). Assessment of integration of several different viral and non-viral donor templates showed high genomic integrity of the GAPDH gene, P2A, and GFP (FIG. 5D). Moreover, a known HDR chemical enhancer was not necessary to achieve high KI with these donor types (FIG. 5E).

[0440] As seen in FIG. 6, >80% of the T cells demonstrated KI of EGFR CAR and CD19 CAR. These data demonstrates that modified T cells produced by using a non-viral donor template can efficiently express CD19 CAR and EGFR CAR.

### Example 3: Generation of CD19 CAR/HLA-E DKI in T Cells

[0441] The present example describes gene editing of populations of T cells using transformation with a non-viral donor template. Following editing, cells were subjected to various assays such as flow cytometry.

[0442] A linear dsDNA encoding CD19-CAR and HLA-E for insertion at the GAPDH locus was used:

TCGAGGAATTCCTGGCTTGTTGTCCACAACCATTAAACCTTAAAAGCTT
TAAAAGCCTTATATATTCTTTTTTTTCTTATAAAACTTAAAACCTTAGA
GGCTATTTAAGTTGCTGATTTATATTAATTTTATTGTTCAAACATGAGA
GCTTAGTACGTGAAACATGAGAGCTTAGTACATTAGCCATGAGAGCTTA
GTACATTAGCCATGAGGGTTTAGTTCATTAAACATGAGAGCTTAGTACA
TTAAACATGAGAGCTTAGTACATACTATCAACAGGTTGAACTGCTGATC
TGTACAGTAGAATTGGTAAAGAGAGTTGTGTAAAATATTGAGTTCGCAC
ATCTTGTTGTCTGATTATTGATTTTTGGCGAAACCATTTGATCATATGA
CAAGATGTGTATCTACCTTAACTTAATGATTTTGATAAAAATCATTAGG
TACCGAATTCACGCGTATTGGGATGAAGACTGTGGATGGCCCCTCCGGG
AAACTGTGGCGTGATGGCCGCGGGGCTCTCCAGAACATCATCCCTGCCT
CTACTGGCGCTGCCAAGGCTGTGGGCAAGGTCATCCCTGAGCTGAACGG
GAAGCTCACTGGCATGGCCTTCCGTGTCCCCACTGCCAACGTGTCAGTG
GTGGACCTGACCTGCCGTCTAGAAAAACCTGCCAAATATGATGACATCA
AGAAGGTGGTGAAGCAGGCGTCGGAGGGCCCCCTCAAGGGCATCCTGGG
CTACACTGAGCACCAGGTGGTCTCCTCTGACTTCAACAGCGACACCCAC
TCCTCCACCTTTGACGCTGGGGCTGGCATTGCCCTCAACGACCACTTTG
TCAAGCTCATTTCCTGGTATGTGGCTGGGGCCAGAGACTGGCTCTTAAA
AAGTGCAGGGTCTGGCGCCCTCTGGTGGCTGGCTCAGAAAAAGGGCCCT
GACAACTCTTTACATCTTCTAGGTATGACAACGAGTTCGGATATAGCAA
TAGAGTGGTCGATCTGATGGCTCATATGGCTAGCAAAGAGGGAAGCGGA
GCTACTAACTTCAGCCTGCTGAAGCAGGCTGGAGACGTGGAGGAGAACC
CTGGACCTATGCTTCTCCTGGTGACAAGCCTTCTGCTCTGTGAGTTACC
ACACCCAGCATTCCTCCTGATCCCAGACATCCAGATGACACAGACTACA
TCCTCCCTGTCTGCCTCTCTGGGAGACAGAGTCACCATCAGTTGCAGGG
CAAGTCAGGACATTAGTAAATATTTAAATTGGTATCAGCAGAAACCAGA
TGGAACTGTTAAACTCCTGATCTACCATACATCAAGATTACACTCAGGA
GTCCCATCAAGGTTCAGTGGCAGTGGGTCTGGAACAGATTATTCTCTCA
CCATTAGCAACCTGGAGCAAGAAGATATTGCCACTTACTTTTGCCAACA
GGGTAATACGCTTCCGTACACGTTCGGAGGGGGGACTAAGTTGGAAATA
ACAGGCTCCACCTCTGGATCCGGCAAGCCCGGATCTGGCGAGGGATCCA
CCAAGGGCGAGGTGAAACTGCAGGAGTCAGGACCTGGCCTGGTGGCGCC
CTCACAGAGCCTGTCCGTCACATGCACTGTCTCAGGGGTCTCATTACCC
GACTATGGTGTAAGCTGGATTCGCCAGCCTCCACGAAAGGGTCTGGAGT
GGCTGGGAGTAATATGGGGTAGTGAAACCACATACTATAATTCAGCTCT
CAAATCCAGACTGACCATCATCAAGGACAACTCCAAGAGCCAAGTTTTC
TTAAAAATGAACAGTCTGCAAACTGATGACACAGCCATTTACTACTGTG
CCAAACATTATTACTACGGTGGTAGCTATGCTATGGACTACTGGGGTCA
AGGAACCTCAGTCACCGTCTCCTCAGCGGCCGCAATTGAAGTTATGTAT
CCTCCTCCTTACCTAGACAATGAGAAGAGCAATGGAACCATTATCCATG
TGAAAGGGAAACACCTTTGTCCAAGTCCCCTATTTCCCGGACCTTCTAA
GCCCTTTTGGGTGCTGGTGGTGGTTGGGGGAGTCCTGGCTTGCTATAGC
TTGCTAGTAACAGTGGCCTTTATTATTTTCTGGGTGAGGAGTAAGAGGA
GCAGGCTCCTGCACAGTGACTACATGAACATGACTCCCCGCCGCCCCGG
GCCCACCCGCAAGCATTACCAGCCCTATGCCCCACCACGCGACTTCGCA
GCCTATCGCTCCAGAGTGAAGTTCAGCAGGAGCGCAGACGCCCCCGCGT
ACCAGCAGGGCCAGAACCAGCTCTATAACGAGCTCAATCTAGGACGAAG
AGAGGAGTACGATGTTTTGGACAAGAGACGTGGCCGGGACCCTGAGATG
GGGGGAAAGCCGAGAAGGAAGAACCCTCAGGAAGGCCTGTACAATGAAC
TGCAGAAAGATAAGATGGCGGAGGCCTACAGTGAGATTGGGATGAAAGG
CGAGCGCCGGAGGGGCAAGGGGCACGATGGCCTTTACCAGGGTCTCAGT
ACAGCCACCAAGGACACCTACGACGCCCTTCACATGCAGGCCCTGCCCC
CTCGCGGAAGCGGAGCCACAAACTTCTCTCTGCTGAAGCAGGCAGGAGA
TGTTGAAGAAAACCCTGGACCTATGAGCCGGAGCGTGGCTCTGGCCGTG
CTGGCCCTGCTGAGCCTGAGCGGCCTCGAGGCTGTGATGGCCCCTCGGA
CCCTGATTCTGGGTGGCGGTGGATCCGGTGGCGGTGGATCCGGTGGCGG
TGGATCCATTCAGCGGACACCCAAAATCCAGGTGTACAGCCGGCATCCC
GCCGAAAACGGCAAGAGCAATTTCCTGAACTGTTACGTGAGCGGCTTCC
ACCCCAGCGACATTGAAGTGGACCTGCTGAAAAACGGCGAGCGGATTGA
AAAAGTGGAACACAGCGACCTGAGCTTTAGCAAAGATTGGAGCTTTTAC
CTGCTGTATTACACCGAATTCACCCCCACCGAGAAGGATGAGTACGCCT
GCCGGGTGAACCATGTGACCCTGAGCCAGCCAAAAATCGTGAAGTGGGA
TCGGGATATGGGTGGCGGTGGATCCGGTGGCGGTGGATCCGGTGGCGGT
GGATCCGGCAGCCATAGCCTGAAATACTTTCACACCAGCGTGAGCCGGC
CTGGCCGGGGCGAGCCACGGTTTATCAGCGTGGGCTATGTGGACGATAC
CCAGTTTGTGCGGTTTGACAATGACGCTGCCAGCCCTCGGATGGTGCCA
CGGGCTCCCTGGATGGAACAGGAGGGCAGCGAATATTGGGACCGGGAAA
CCCGGAGCGCCCGGGATACCGCCCAGATTTTCCGGGTGAATCTGCGGAC
CCTGCGGGGCTACTATAACCAGAGCGAAGCTGGCAGCCATACACTGCAG
TGGATGCACGGCTGTGAGCTGGGCCCAGATGGCCGGTTCCTGCGGGGCT
ATGAACAGTTTGCCTATGATGGCAAAGACTATCTGACACTGAATGAAGA
CCTGCGGAGCTGGACCGCCGTGGACACAGCTGCCCAGATTAGCGAGCAG
AAGAGCAATGATGCCAGCGAGGCCGAGCATCAGCGGGCTTACCTGGAGG
ACACATGCGTGGAGTGGCTGCATAAATATCTGGAAAAAGGCAAGGAGAC
ACTGCTGCATCTGGAACCTCCAAAGACCCACGTGACACACCATCCTATT
AGCGATCACGAGGCTACCCTGCGGTGCTGGGCCCTGGGCTTCTACCCCG
CCGAGATCACCCTGACCTGGCAGCAGGATGGCGAAGGCCACACCCAGGA
TACCGAGCTGGTGGAAACACGGCCTGCCGGCGACGGCACATTCCAGAAG
TGGGCTGCCGTGGTGGTGCCCAGCGGCGAAGAGCAGCGGTACACCTGCC
ATGTGCAGCACGAAGGCCTGCCTGAACCAGTGACCCTGCGGTGGAAACC
AGCCAGCCAGCCCACCATCCCCATCGTGGGCATTATCGCTGGCCTGGTG
CTGCTGGGCAGCGTGGTGAGCGGCGCCGTGGTGGCCGCTGTGATTTGGC
GGAAGAAAAGCAGCGGCGGCAAAGGCGGCAGCTACAGCAAGGCCGAGTG
GAGCGACAGCGCTCAGGGCAGCGAAAGCCACAGCCTGTAAAGCGGCCGC
GTCGAGTCTAGAGGGCCCGTTTAAACCCGCTGATCAGCCTCGACTGTGC
CTTCTAGTTGCCAGCCATCTGTTGTTTGCCCCTCCCCCGTGCCTTCCTT
GACCCTGGAAGGTGCCACTCCCACTGTCCTTTCCTAATAAAATGAGGAA
ATTGCATCGCATTGTCTGAGTAGGTGTCATTCTATTCTGGGGGGTGGGG
TGGGGCAGGACAGCAAGGGGGAGGATTGGGAAGACAATAGCAGGCATGC
TGGGGATGCGGTGGGCTCTATGGATTTGGCTACAGCAACAGGGTGGTGG
ACCTCATGGCCCACATGGCCTCCAAGGAGTAAGACCCCTGGACCACCAG
CCCCAGCAAGAGCACAAGAGGAAGAGAGAGACCCTCACTGCTGGGGAGT
CCCTGCCACACTCAGTCCCCCACCACACTGAATCTCCCCTCCTCACAGT
TGCCATGTAGACCCCTTGAAGAGGGGAGGGGCCTAGGGAGCCGCACCTT
GTCATGTACCATCAATAAAGTACCCTGTGCTCAACCAGTTACTTGTCCT
GTCTTATTCTAGGGTCTGGGGCAGAGGGGAGGGAAGCTGGGCTTGTGTC
AAGGTGAGACATTCTTGCTGGGGAGGGACCTGGTATGTTCTCCTCAGAC
TGAGGGTAGGGCCTCCAAACAGCCTTGCTTGCTTCGAGAACCATTTGCT
TCCCGCTCAGACGTCTTGAGTGCTACAGGAAGCTGGCACCACTACTTCA
GAGAACAAGGCCTTTTCCTCTCCTCGCTCCAGTATCCCAATGGCGCGCC
GAGCTTGGC

[0443] T cells isolated from peripheral blood mononuclear cells and frozen in cryopreservation media were thawed in a bead bath as known in the art. A CD19 CAR and B2M-HLA-E bicistronic cargo was knocked-in using methods disclosed herein using the linear dsDNA donor template (described above), an RNP comprising gRNA RSQ22337 (SEQ ID NO: 95) and Cas12a (SEQ ID NO: 62), and a B2M-targeting RNP.

[0444] T cells were sorted using flow cytometry to determine successful transformation, editing, knock-in cassette integration, and/or expression events. As seen in FIG. 7, the B2M KO/CD19 CAR/B2M-HLA-E (NK Shield) DKI T cells were approximately 99.3% negative for B2M (MHC1) expression and approximately 70% positive for simultaneous expression of HLA-E and CD19 CAR. These data demonstrate that modified T cells produced using a non-viral donor template in methods disclosed herein can efficiently express both CD19 CAR and B2M-HLA-E.

### EQUIVALENTS

[0445] It is to be understood that while the disclosure has been described in conjunction with the detailed description thereof, the foregoing description is intended to illustrate and not limit the scope of the present disclosure, which is defined by the scope of the appended claims. Other aspects, advantages, and modifications are within the scope of the following claims.

We claim:

1. A method of editing the genome of a primary cell, the method comprising contacting the primary cell with:
(i) a nuclease that causes a break within an endogenous coding sequence of an essential gene in the cell, and
(ii) a non-viral donor template that comprises a knock-in cassette comprising an exogenous coding sequence for a gene product of interest in frame with and downstream (3′) of an exogenous coding sequence or partial coding sequence of the essential gene, wherein the knock-in cassette is integrated into the genome of the cell by homology-directed repair (HDR) of the break, resulting in a genome-edited cell that expresses:
(a) the gene product of interest, and
(b) the gene product encoded by the essential gene, or a functional variant thereof.

2. The method of claim 1, wherein, if the knock-in cassette is not integrated into the genome of the cell by homology-directed repair (HDR) in the correct position or orientation, the cell no longer expresses the gene product encoded by the essential gene, or a functional variant thereof.

3. The method of claim 1 or 2, wherein the break is a double-strand break.

4. The method of any one of claims 1-3, wherein the break is located within the last 1000, 500, 400, 300, 200, 100, or 50 base pairs of the endogenous coding sequence of the essential gene.

5. The method of any one of claims 1-3, wherein the break is located within the last exon of the essential gene.

6. The method of any one of claims 1-5, wherein the nuclease is a CRISPR/Cas nuclease and the method further comprises contacting the cell with a guide molecule for the CRISPR/Cas nuclease.

7. The method of any one of claims 1-5, wherein the nuclease is a zinc finger nuclease (ZFN), a transcription activator-like effector nuclease (TALEN) or a meganuclease.

8. The method of any one of claims 1-7, wherein the donor template is a single stranded DNA template or a double stranded DNA template.

9. The method of claim 8, wherein the donor template is a circular double stranded DNA template, a linear double stranded DNA template, a linear single-stranded DNA template, or a close-ended linear double stranded DNA template.

10. The method of any one of claims 1-9, wherein the donor template comprises homology arms on either side of the knock-in cassette.

11. The method of claim 10, wherein the homology arms correspond to sequences located on either side of the break in the genome of the cell.

12. The method of any one of claims 1-11, wherein the knock-in cassette comprises a regulatory element that enables expression of the gene product encoded by the essential gene and the gene product of interest as separate gene products, optionally, wherein at least one of the gene products is a protein and the regulatory element enables expression of that protein separate from the other gene product.

13. The method of claim 12, wherein the knock-in cassette comprises an IRES or 2A element located between the exogenous coding sequence or partial coding sequence of the essential gene and the exogenous coding sequence for the gene product of interest.

14. The method of claim 13, wherein the 2A element is a T2A element (EGRGSLLTCGDVEENPGP), a P2A element (ATNFSLLKQAGDVEENPGP), a E2A element (QCTNYALLKLAGDVESNPGP), or an F2A element (VKQTLNFDLLKLAGDVESNPGP).

15. The method of claim 13 or 14, wherein the knock-in cassette further comprises a sequence encoding a linker peptide upstream of the 2A element.

16. The method of claim 15, wherein the linker peptide comprises the amino acid sequence GSG.

17. The method of any one of claims 1-16, wherein the knock-in cassette comprises a polyadenylation sequence, and optionally a 3′ UTR sequence, downstream of the exogenous coding sequence for the gene product of interest, wherein, if a 3′UTR sequence is present, the 3′UTR sequence is positioned 3′ of the exogenous coding sequence and 5′ of the polyadenylation sequence.

18. The method of any one of claims 1-17, wherein the exogenous partial coding sequence of the essential gene in the knock-in cassette encodes a C-terminal fragment of a protein encoded by the essential gene.

19. The method of claim 18, wherein the C-terminal fragment is less than 500, 250, 150, 125, 100, 75, 50, 25, 20, 15 or 10 amino acids in length.

20. The method of claim 18 or 19, wherein the C-terminal fragment includes an amino acid sequence that is encoded by a region of the endogenous coding sequence of the essential gene that spans the break.

21. The method of any one of claims 1-20, wherein the exogenous coding sequence or partial coding sequence of the essential gene in the knock-in cassette is less than 100% identical to the corresponding endogenous coding sequence of the essential gene of the cell.

22. The method of claim 21, wherein the exogenous coding sequence or partial coding sequence of the essential gene in the knock-in cassette has been codon optimized relative to the corresponding endogenous coding sequence of the essential gene of the cell to prevent further binding of the nuclease to the target site, to reduce the likelihood of recombination after integration of the knock-in cassette into the genome of the cell, and/or to increase expression of the gene product of the essential gene and/or the gene product of interest after integration of the knock-in cassette into the genome of the cell.

23. The method of any one of claims 1-22, wherein the essential gene is a housekeeping gene, e.g., a gene listed in Table 3.

24. The method of any one of claims 1-22, wherein the essential gene is a gene listed in Table 4.

25. The method of any one of claims 1-24, wherein the primary cell is a T cell.

26. The method of any one of claims 1-25, wherein the donor template does not comprise a reporter gene, e.g., a fluorescent reporter gene or an antibiotic resistance gene.

27. The method of any one of claims 1-26, wherein the gene product of interest is a chimeric antigen receptor (CAR), a non-naturally occurring variant of FcγRIII (CD16), an interleukin (e.g., interleukin 15 (IL-15), interleukin 15 receptor (IL-15R) or a variant thereof, interleukin 12 (IL-12), interleukin-12 receptor (IL-12R) or a variant thereof), a human leukocyte antigen (e.g., human leukocyte antigen G (HLA-G), human leukocyte antigen E (HLA-E)), leukocyte surface antigen cluster of differentiation CD47 (CD47), or any combination of two or more thereof.

28. A primary cell, or population of primary cells, produced by the method of any one of claims 1-27 or progeny thereof.

29. The primary cell of claim 28, for use as a medicament.

30. The primary cell of claim 28, for use in the treatment of a disease, disorder, or condition, e.g., a cancer.

31. A system for editing the genome of a primary cell, the system comprising the primary cell, a nuclease that causes a break within an endogenous coding sequence of an essential gene of the cell, and a non-viral donor template that comprises a knock-in cassette comprising an exogenous coding sequence for a gene product of interest in frame with and downstream (3′) of an exogenous coding sequence or partial coding sequence of the essential gene.

32. The system of claim 31, wherein the break is a double-strand break.

33. The system of claim 31 or 32, wherein the break is located within the last 1000, 500, 400, 300, 200, 100 or 50 base pairs of the coding sequence of the essential gene.

34. The system of any one of claims 31-33, wherein the break is located within the last exon of the essential gene.

35. The system of any one of claims 31-34, wherein the nuclease is a CRISPR/Cas nuclease and the system further comprises a guide molecule for the CRISPR/Cas nuclease.

36. The system of any one of claims 31-34, wherein the nuclease is a zinc finger nuclease (ZFN), a transcription activator-like effector nuclease (TALEN) or a meganuclease.

37. The system of any one of claims 31-36, wherein the donor template is a single stranded DNA template or a double stranded DNA template.

38. The system of any one of claims 31-36, wherein the donor template is a circular double stranded DNA template, a linear double stranded DNA template, a linear single-stranded DNA template, or a close-ended linear double stranded DNA template.

39. The system of any one of claims 31-38, wherein the donor template comprises homology arms on either side of the knock-in cassette.

40. The system of claim 39, wherein the homology arms correspond to sequences located on either side of the break in the genome of the cell.

41. The system of any one of claims 31-40, wherein the knock-in cassette comprises a regulatory element that enables expression of the gene product encoded by the essential gene and the gene product of interest as separate gene products, optionally, wherein at least one of the gene products is a protein and the regulatory element enables expression of that protein separate from the other gene product.

42. The system of claim 41, wherein the knock-in cassette comprises an IRES or 2A element located between the exogenous coding sequence or partial coding sequence of the essential gene and the exogenous coding sequence for the gene product of interest.

43. The system of any one of claims 31-42, wherein the knock-in cassette comprises a polyadenylation sequence, and optionally a 3′ UTR sequence, downstream of the exogenous coding sequence for the gene product of interest, wherein, if a 3′UTR sequence is present, the 3′UTR sequence is positioned 3′ of the exogenous coding sequence and 5′ of the polyadenylation sequence.

44. The system of any one of claims 31-43, wherein the exogenous partial coding sequence of the essential gene in the knock-in cassette encodes a C-terminal fragment of a protein encoded by the essential gene.

45. The system of claim 44, wherein the C-terminal fragment is less than 500, 250, 150, 125, 100, 75, 50, 25, 20, 15 or 10 amino acids in length.

46. The system of claim 44 or 45, wherein the C-terminal fragment includes an amino acid sequence that is encoded by a region of the coding sequence of the essential gene that spans the break.

47. The system of any one of claims 31-46, wherein the exogenous coding sequence or partial coding sequence of the essential gene in the knock-in cassette is less than 100% identical to the corresponding endogenous coding sequence of the essential gene of the cell.

48. The system of claim 47, wherein the exogenous coding sequence or partial coding sequence of the essential gene in the knock-in cassette has been codon optimized relative to the corresponding endogenous coding sequence of the essential gene of the cell to prevent further binding of a nuclease to the target site, to reduce the likelihood of recombination after integration of the knock-in cassette into the genome of the cell, or to increase expression of the gene product of the essential gene and/or the gene product of interest after integration of the knock-in cassette into the genome of the cell.

49. The system of claim 48, wherein the exogenous coding sequence or partial coding sequence of the essential gene in the knock-in cassette does not comprise a target site for the nuclease.

50. The system of any one of claims 31-49, wherein the essential gene is a housekeeping gene, e.g., a gene listed in Table 3.

51. The system of any one of claims 31-50, wherein the essential gene is a gene listed in Table 4.

52. The system of any one of claims 31-51, wherein the primary cell is a T cell.

53. The system of any one of claims 31-52, wherein the donor DNA template does not comprise a reporter gene, e.g., a fluorescent reporter gene or an antibiotic resistance gene.

54. The system of any one of claims 31-53, wherein the gene product of interest is a chimeric antigen receptor (CAR), a non-naturally occurring variant of FcγRIII (CD16), interleukin 15 (IL-15), interleukin 15 receptor (IL-15R) or a variant thereof, interleukin 12 (IL-12), interleukin-12 receptor (IL-12R) or a variant thereof, human leukocyte antigen G (HLA-G), human leukocyte antigen E (HLA-E), leukocyte surface antigen cluster of differentiation CD47 (CD47), or any combination of two or more thereof.

55. A non-viral donor template comprising a knock-in cassette with an exogenous coding sequence for a gene product of interest in frame with and downstream (3′) of an exogenous coding sequence or partial coding sequence of an essential gene.

56. The donor template of claim 55, for use in editing the genome of a primary cell by homology-directed repair (HDR).

57. The donor template of claim 55 or 56, wherein the donor template is a single stranded DNA template or a double stranded DNA template.

58. The donor template of claim 55 or 56, wherein the donor template is a circular double stranded DNA template, a linear double stranded DNA template, a linear single-stranded DNA template, or a close-ended linear double stranded DNA template.

59. The donor template of any one of claims 55-58, wherein the donor template comprises homology arms on either side of the knock-in cassette.

60. The donor template of any one of claims 55-59, wherein the knock-in cassette comprises a regulatory element that enables expression of the gene product encoded by the essential gene and the gene product of interest as separate gene products, optionally, wherein at least one of the gene products is a protein and the regulatory element enables expression of that protein separate from the other gene product.

61. The donor template of claim 60, wherein the knock-in cassette comprises an IRES or 2A element located between the exogenous coding sequence or partial coding sequence of the essential gene and the exogenous coding sequence for the gene product of interest.

62. The donor template of any one of claims 55-61, wherein the knock-in cassette comprises a polyadenylation sequence, and optionally a 3′ UTR sequence, downstream of the exogenous coding sequence for the gene product of interest, wherein, if a 3′UTR sequence is present, the 3′UTR sequence is positioned 3′ of the exogenous coding sequence and 5′ of the polyadenylation sequence.

63. The donor template of any one of claims 55-62, wherein the exogenous partial coding sequence of the essential gene in the knock-in cassette encodes a C-terminal fragment of a protein encoded by the endogenous coding sequence of the essential gene.

64. The donor template of claim 63, wherein the C-terminal fragment is less than 500, 250, 150, 125, 100, 75, 50, 25, 20, 15 or 10 amino acids in length.

65. The donor template of any one of claims 55-64, wherein the exogenous coding sequence or partial coding sequence of the essential gene in the knock-in cassette is less than 100% identical to the corresponding endogenous coding sequence of the essential gene.

66. The donor template of claim 65, wherein the exogenous coding sequence or partial coding sequence of the essential gene in the knock-in cassette has been codon optimized relative to the corresponding endogenous coding sequence of the essential gene to prevent further binding of a nuclease to the target site, to reduce the likelihood of recombination after integration of the knock-in cassette into a genome of a cell, or to increase expression of the gene product of the essential gene and/or the gene product of interest after integration of the knock-in cassette into a genome of a cell.

67. The donor template of claim 66, wherein the exogenous coding sequence or partial coding sequence of the essential gene in the knock-in cassette does not comprise a target site for a nuclease.

68. The donor template of any one of claims 55-67, wherein the essential gene is a housekeeping gene, e.g., a gene listed in Table 3.

69. The donor template of any one of claims 55-67, wherein the essential gene is a gene listed in Table 4.

70. The donor template of any one of claims 55-69, wherein the donor template does not comprise a reporter gene, e.g., a fluorescent reporter gene or an antibiotic resistance gene.

71. The donor template of any one of claims 55-70, wherein the gene product of interest is a chimeric antigen receptor (CAR), a non-naturally occurring variant of FcγRIII (CD16), interleukin 15 (IL-15), interleukin 15 receptor (IL-15R) or a variant thereof, interleukin 12 (IL-12), interleukin-12 receptor (IL-12R) or a variant thereof, human leukocyte antigen G (HLA-G), human leukocyte antigen E (HLA-E), leukocyte surface antigen cluster of differentiation CD47 (CD47), or any combination of two or more thereof.

72. The method of any one of claims 1-27, wherein the method does not comprise using an HDR enhancer.

The application's sequence listing, which the Patent Office published only in electronic form, follows.

SEQUENCE LISTING (19023 sequences)

SEQ ID NO: 1 - DNA, 555 bp, synthetic construct
  source 1..555: mol_type = other DNA
gaagactgtggatggcccctccgggaaactgtggcgtgatggccgcggggctctccagaacatcatccctgcctctactggcgctgccaaggctgtgggcaaggtcatccctgagctgaacgggaagctcactggcatggccttccgtgtccccactgccaacgtgtcagtggtggacctgacctgccgtctagaaaaacctgccaaatatgatgacatcaagaaggtggtgaagcaggcgtcggagggccccctcaagggcatcctgggctacactgagcaccaggtggtctcctctgacttcaacagcgacacccactcctccacctttgacgctggggctggcattgccctcaacgaccactttgtcaagctcatttcctggtatgtggctggggccagagactggctcttaaaaagtgcagggtctggcgccctctggtggctggctcagaaaaagggccctgacaactctttacatcttctaggtatgacaacgagttcggatatagcaatagagtggtcgatctgatggctcatatggctagcaaagag

SEQ ID NO: 2 - DNA, 621 bp, synthetic construct
  source 1..621: mol_type = other DNA
gaagactgtggatggcccctccgggaaactgtggcgtgatggccgcggggctctccagaacatcatccctgcctctactggcgctgccaaggctgtgggcaaggtcatccctgagctgaacgggaagctcactggcatggccttccgtgtccccactgccaacgtgtcagtggtggacctgacctgccgtctagaaaaacctgccaaatatgatgacatcaagaaggtggtgaagcaggcgtcggagggccccctcaagggcatcctgggctacactgagcaccaggtggtctcctctgacttcaacagcgacacccactcctccacctttgacgctggggctggcattgccctcaacgaccactttgtcaagctcatttcctggtatgtggctggggccagagactggctcttaaaaagtgcagggtctggcgccctctggtggctggctcagaaaaagggccctgacaactctttacatcttctaggtatgacaacgagttcggatatagcaatagagtggtcgatctgatggctcatatggctagcaaagagggaagcggagctactaacttcagcctgctgaagcaggctggagacgtggaggagaaccctggacct

SEQ ID NO: 3 - DNA, 567 bp, synthetic construct
  source 1..567: mol_type = other DNA
ggctttcccataatttcctttcaaggtggggagggaggtagaggggtgatgtggggagtacgctgcagggcctcactccttttgcagaccacagtccatgccatcactgccacccagaagactgtggatggcccctccgggaaactgtggcgtgatggccgcggggctctccagaacatcatccctgcctctactggcgctgccaaggctgtgggcaaggtcatccctgagctgaacgggaagctcactggcatggccttccgtgtccccactgccaacgtgtcagtggtggacctgacctgccgtctagaaaaacctgccaaatatgatgacatcaagaaggtggtgaagcaggcgtcggagggccccctcaagggcatcctgggctacactgagcaccaggtggtctcctctgacttcaacagcgacacccactcctccacctttgacgctggggctggcattgccctcaacgaccactttgtcaagctcatctcttggtacgacaatgagttcggatatagcaatagagtggtcgatctgatggctcatatggctagcaaagag

SEQ ID NO: 4 - DNA, 500 bp, synthetic construct
  source 1..500: mol_type = other DNA
atttggctacagcaacagggtggtggacctcatggcccacatggcctccaaggagtaagacccctggaccaccagccccagcaagagcacaagaggaagagagagaccctcactgctggggagtccctgccacactcagtcccccaccacactgaatctcccctcctcacagttgccatgtagaccccttgaagaggggaggggcctagggagccgcaccttgtcatgtaccatcaataaagtaccctgtgctcaaccagttacttgtcctgtcttattctagggtctggggcagaggggagggaagctgggcttgtgtcaaggtgagacattcttgctggggagggacctggtatgttctcctcagactgagggtagggcctccaaacagccttgcttgcttcgagaaccatttgcttcccgctcagacgtcttgagtgctacaggaagctggcaccactacttcagagaacaaggccttttcctctcctcgctccagt

SEQ ID NO: 5 - DNA, 500 bp, synthetic construct
  source 1..500: mol_type = other DNA
agactggctcttaaaaagtgcagggtctggcgccctctggtggctggctcagaaaaagggccctgacaactcttttcatcttctaggtatgacaacgaatttggctacagcaacagggtggtggacctcatggcccacatggcctccaaggagtaagacccctggaccaccagccccagcaagagcacaagaggaagagagagaccctcactgctggggagtccctgccacactcagtcccccaccacactgaatctcccctcctcacagttgccatgtagaccccttgaagaggggaggggcctagggagccgcaccttgtcatgtaccatcaataaagtaccctgtgctcaaccagttacttgtcctgtcttattctagggtctggggcagaggggagggaagctgggcttgtgtcaaggtgagacattcttgctggggagggacctggtatgttctcctcagactgagggtagggcctccaaacagccttgcttgct

SEQ ID NO: 6 - DNA, 562 bp, synthetic construct
  source 1..562: mol_type = other DNA
gcagacttccatttacagtgaggaggtgagcattgcattgaacaaaagatggcgttttcacttggaattagttatctgaagctttaggattcctcagcaatatgattatgagacaagaaaggaagattcagaaatgagtctagttgaaggcagcaattcagagaagaagattcagttgttatcattgccgtcctgcttggtttatggcctggttcaggaccaaggagagaagtgtgaatacatgcctcttgagctatagaatgagacgctggagtcactaagatgattttttaaaagtattgttttataaacaaaaataagattgtgacaagggattccactattaatgttttcatgcctgtgccttaatctgactgggtatggtgagaattgtgcttgcagctttaaggtaagaattttaccatcttaatatgttaagaagtgccatttcagtctctcatctctactccaacttgtcttcttaggtgctaaagtcagagccgaaatctacgaggccttcgagaacatctaccccatcctgaagggcttcagaaagaccacc

SEQ ID NO: 7 - DNA, 580 bp, synthetic construct
  source 1..580: mol_type = other DNA
ctgaccacagctctgcaagcagacttccatttacagtgaggaggtgagcattgcattgaacaaaagatggcgttttcacttggaattagttatctgaagctttaggattcctcagcaatatgattatgagacaagaaaggaagattcagaaatgagtctagttgaaggcagcaattcagagaagaagattcagttgttatcattgccgtcctgcttggtttatggcctggttcaggaccaaggagagaagtgtgaatacatgcctcttgagctatagaatgagacgctggagtcactaagatgattttttaaaagtattgttttataaacaaaaataagattgtgacaagggattccactattaatgttttcatgcctgtgccttaatctgactgggtatggtgagaattgtgcttgcagctttaaggtaagaattttaccatcttaatatgttaagaagtgccatttcagtctctcatctctactccaacttgtcttcttaggggctaaagtgcgggccgagatctacgaggccttcgagaatatctaccccatcctgaagggcttcagaaagaccacc

SEQ ID NO: 8 - DNA, 521 bp, synthetic construct
  source 1..521: mol_type = other DNA
acaaaagatggcgttttcacttggaattagttatctgaagctttaggattcctcagcaatatgattatgagacaagaaaggaagattcagaaatgagtctagttgaaggcagcaattcagagaagaagattcagttgttatcattgccgtcctgcttggtttatggcctggttcaggaccaaggagagaagtgtgaatacatgcctcttgagctatagaatgagacgctggagtcactaagatgattttttaaaagtattgttttataaacaaaaataagattgtgacaagggattccactattaatgttttcatgcctgtgccttaatctgactgggtatggtgagaattgtgcttgcagctttaaggtaagaattttaccatcttaatatgttaagaagtgccatttcagtctctcatctctactccaacttgtcttcttaggtgctaaagtcagagcagaaatttatgaagcattcgagaacatctaccctattctaaagggattcaggaagacgacg

SEQ ID NO: 9 - DNA, 500 bp, synthetic construct
  source 1..500: mol_type = other DNA
cagaaatttatgaagcatttgaaaacatctaccctattctaaagggattcaggaagacgacgtaatggctctcatgtacccttgcctcccccacccccttctttttttttttttaaacaaatcagtttgttttggtacctttaaatggtggtgttgtgagaagatggatgttgagttgcagggtgtggcaccaggtgatgcccttctgtaagtgcccaccgcgggatgccgggaaggggcattatttgtgcactgagaacaccgcgcagcgtgactgtgagttgctcataccgtgctgctatctgggcagcgctgcccatttatttatatgtagattttaaacactgctgttgacaagttggtttgagggagaaaactttaagtgttaaagccacctctataattgattggactttttaattttaatgtttttccccatgaaccacagtttttatatttctaccagaaaagtaaaaatcttttttaaaagtgttgttttt

SEQ ID NO: 10 - DNA, 500 bp, synthetic construct
  source 1..500: mol_type = other DNA
taggtgctaaagtcagagcagaaatttatgaagcatttgaaaacatctaccctattctaaagggattcaggaagacgacgtaatggctctcatgtacccttgcctcccccacccccttctttttttttttttaaacaaatcagtttgttttggtacctttaaatggtggtgttgtgagaagatggatgttgagttgcagggtgtggcaccaggtgatgcccttctgtaagtgcccaccgcgggatgccgggaaggggcattatttgtgcactgagaacaccgcgcagcgtgactgtgagttgctcataccgtgctgctatctgggcagcgctgcccatttatttatatgtagattttaaacactgctgttgacaagttggtttgagggagaaaactttaagtgttaaagccacctctataattgattggactttttaattttaatgtttttccccatgaaccacagtttttatatttctaccagaaaagtaaaaatcttt

SEQ ID NO: 11 - DNA, 500 bp, synthetic construct
  source 1..500: mol_type = other DNA
aagggattcaggaagacgacgtaatggctctcatgtacccttgcctcccccacccccttctttttttttttttaaacaaatcagtttgttttggtacctttaaatggtggtgttgtgagaagatggatgttgagttgcagggtgtggcaccaggtgatgcccttctgtaagtgcccaccgcgggatgccgggaaggggcattatttgtgcactgagaacaccgcgcagcgtgactgtgagttgctcataccgtgctgctatctgggcagcgctgcccatttatttatatgtagattttaaacactgctgttgacaagttggtttgagggagaaaactttaagtgttaaagccacctctataattgattggactttttaattttaatgtttttccccatgaaccacagtttttatatttctaccagaaaagtaaaaatcttttttaaaagtgttgtttttctaatttataactcctaggggttatttctgtgccagacaca

SEQ ID NO: 12 - DNA, 522 bp, synthetic construct
  source 1..522: mol_type = other DNA
ggcccgggggactccacatggtggcaggcagtggcatcagcaagacactctctccctcacagaacgtgaagctccctgacgcctatgagcgcctcatcctggacgtcttctgcgggagccagatgcacttcgtgcgcaggtgaggcccagctgccggcccctgcatacctgtgggctatggggtggcctttgccctccctccctgtgtgccaccggcctcccaagccataccatgtcccctcagcgacgagctccgtgaggcctggcgtattttcaccccactgctgcaccagattgagctggagaagcccaagcccatcccctatatttatggcaggtgaggaaagggtgggggctggggacagagcccagcgggcaggggcggggtgagggtggagctacctcatgcctctcctccacccgtcactctccagccgaggccccacggaggcagacgagctgatgaagagagtgggcttccagtacgagggaacctacaaatgggtcaaccctcacaagctg

SEQ ID NO: 13 - DNA, 500 bp, synthetic construct
  source 1..500: mol_type = other DNA
gtgggtgaacccccacaagctctgagccctgggcacccacctccacccccgccacggccaccctccttcccgccgcccgaccccgagtcgggaggactccgggaccattgacctcagctgcacattcctggccccgggctctggccaccctggcccgcccctcgctgctgctactacccgagcccagctacattcctcagctgccaagcactcgagaccatcctggcccctccagaccctgcctgagcccaggagctgagtcacctcctccactcactccagcccaacagaaggaaggaggagggcgcccattcgtctgtcccagagcttattggccactgggtctcactcctgagtggggccagggtgggagggagggacgagggggaggaaaggggcgagcacccacgtgagagaatctgcctgtggccttgcccgccagcctcagtgccacttgacattccttgtcaccagcaacatctcgagccccctggatgtcc

SEQ ID NO: 14 - DNA, 587 bp, synthetic construct
  source 1..587: mol_type = other DNA
ccagggggctgtagtggggccaggctggacctctgtgccctgagcatggctttcttgtttttcagttttggaactccccaaagagctgtcagaaatctttgatcccacacgaggtaggctgctgcattcctccctgaggctaggggtaagggacacagctcattgggtcctatggctgttttcttgcccttttgaggaccttgttgtggcgcttatggtaactggggcaaagggtgaagttcctgatgggcaggtggggttccctttcctgggctttggtgggtggagaggtgggagctggaatgttagtaactgagctccctccattcccagagtgcatgagctcggagctgctggaggagttgatgtcctcagaaggtgggtggccctggaaggtgggagtgggtgtgggcaggggttgggctgctgctaggggagccctggcccagggcctgagactagtgctctctgcagtgttcgcccctctgctgagactttctcctcctcctggcgaccacgactacatctacaacctggacgagagcgagggcgtgtgcgacctgtttgatgtgcccgtgctgaacctg

SEQ ID NO: 15 - DNA, 568 bp, synthetic construct
  source 1..568: mol_type = other DNA
ccaggctggacctctgtgccctgagcatggctttcttgtttttcagttttggaactccccaaagagctgtcagaaatctttgatcccacacgaggtaggctgctgcattcctccctgaggctaggggtaagggacacagctcattgggtcctatggctgttttcttgcccttttgaggaccttgttgtggcgcttatggtaactggggcaaagggtgaagttcctgatgggcaggtggggttccctttcctgggctttggtgggtggagaggtgggagctggaatgttagtaactgagctccctccattcccagagtgcatgagctcggagctgctggaggagttgatgtcctcagaaggtgggtggccctggaaggtgggagtgggtgtgggcaggggttgggctgctgctaggggagccctggcccagggcctgagactagtgctctctgcagtgtttgcccctctgcttcgtcttagtcctcctccgggcgaccacgactacatctacaacctggacgagagcgagggcgtgtgcgacctgtttgatgtgcccgtgctgaacctg

SEQ ID NO: 16 - DNA, 500 bp, synthetic construct
  source 1..500: mol_type = other DNA
gtcagaaatctttgatcccacacgaggtaggctgctgcattcctccctgaggctaggggtaagggacacagctcattgggtcctatggctgttttcttgcccttttgaggaccttgttgtggcgcttatggtaactggggcaaagggtgaagttcctgatgggcaggtggggttccctttcctgggctttggtgggtggagaggtgggagctggaatgttagtaactgagctccctccattcccagagtgcatgagctcggagctgctggaggagttgatgtcctcagaaggtgggtggccctggaaggtgggagtgggtgtgggcaggggttgggctgctgctaggggagccctggcccagggcctgagactagtgctctctgcagtgtttgcccctctgcttcgtctttctccacccccgggagaccacgattatatctacaacctggacgagagtgaaggtgtctgtgacctcttcgacgtgcccgtgctcaacctc

SEQ ID NO: 17 - DNA, 500 bp, synthetic construct
  source 1..500: mol_type = other DNA
ccacccccgggagaccacgattatatctacaacctggacgagagtgaaggtgtctgtgacctctttgatgtgcctgttctcaacctctgactgacagggacatgccctgtgtggctgggacccagactgtctgacctgggggttgcctggggacctctcccacccgacccctacagagcttgagagccacagacgcctggcttctccggcctcccctcaccgcacagttctggccacagctcccgctcctgtgctggcacttctgtgctcgcagagcaggggaacaggactcagcccccatcaccgtggagccaaagtgtttgcttctccctttctgcggccttcgccagcccaggctcggctgccacccagtggcacagaaccgaggagctgccattaccccccatagggggcagtgtcttgttcctgccagcctcagtgtcttgcttctgccagctccttcccctaggagggaagggtggggtggaactgggcacatg

SEQ ID NO: 18 - DNA, 500 bp, synthetic construct
  source 1..500: mol_type = other DNA
attatatctacaacctggacgagagtgaaggtgtctgtgacctctttgatgtgcctgttctcaacctctgactgacagggacatgccctgtgtggctgggacccagactgtctgacctgggggttgcctggggacctctcccacccgacccctacagagcttgagagccacagacgcctggcttctccggcctcccctcaccgcacagttctggccacagctcccgctcctgtgctggcacttctgtgctcgcagagcaggggaacaggactcagcccccatcaccgtggagccaaagtgtttgcttctccctttctgcggccttcgccagcccaggctcggctgccacccagtggcacagaaccgaggagctgccattaccccccatagggggcagtgtcttgttcctgccagcctcagtgtcttgcttctgccagctccttcccctaggagggaagggtggggtggaactgggcacatgccagcaccacttctagctt

SEQ ID NO: 19 - DNA, 500 bp, synthetic construct
  source 1..500: mol_type = other DNA
tgactgacagggacatgccctgtgtggctgggacccagactgtctgacctgggggttgcctggggacctctcccacccgacccctacagagcttgagagccacagacgcctggcttctccggcctcccctcaccgcacagttctggccacagctcccgctcctgtgctggcacttctgtgctcgcagagcaggggaacaggactcagcccccatcaccgtggagccaaagtgtttgcttctccctttctgcggccttcgccagcccaggctcggctgccacccagtggcacagaaccgaggagctgccattaccccccatagggggcagtgtcttgttcctgccagcctcagtgtcttgcttctgccagctccttcccctaggagggaagggtggggtggaactgggcacatgccagcaccacttctagcttccttcgctatcccccaccccctgaccctccagctcctcctggccctctcacgtgcccacttctgctgg

SEQ ID NO: 20 - DNA, 626 bp, synthetic construct
  source 1..626: mol_type = other DNA
agagcagggtttcttgacagcagtgctattggcattttaaactggataattctttgttgtgatgggctttcctgtggactgtactatgttggtacacaagaaaaacagtgtactatgtgaatactcactcaaagccagtagcactccctgattgtaacaccaaaaaagtctctcagcattgccaaatgtcccctgtggcagcagaatcactccctgatgagaaccactaccctggagtaaaatctataactatgtcttagaaaataacacagaaaattaatatttctttcactctactccttccattagtgatcaaataaagaaggcatttggcgctacttgccaaattgttggctcaaacttgtgctgaaccttttttggttttctacacttaagtttttttgcctataacccagagaactttgaaaatagagtgtagttaatgtgtatctaatgttactttgtattgacttaatttaccggcctttaatccacagcataagaagtcccacggcaaggacaaagagaaccggggcatcaacacactggaacggtccaaggtcgaggaaacaaccgagcacctggtcaccaagagcagactgcctctgagagcccagatcaacctg

SEQ ID NO: 21 - DNA, 558 bp, synthetic construct
  source 1..558: mol_type = other DNA
ttcctgtggactgtactatgttggtacacaagaaaaacagtgtactatgtgaatactcactcaaagccagtagcactccctgattgtaacaccaaaaaagtctctcagcattgccaaatgtcccctgtggcagcagaatcactccctgatgagaaccactaccctggagtaaaatctataactatgtcttagaaaataacacagaaaattaatatttctttcactctactccttccattagtgatcaaataaagaaggcatttggcgctacttgccaaattgttggctcaaacttgtgctgaaccttttttggttttctacacttaagtttttttgcctataacccagagaactttgaaaatagagtgtagttaatgtgtatctaatgttactttgtattgacttaattttcccgccttaaatccacagcataaaaaatcacatggaaaagacaaagaaaacagaggcattaacacactggagaggtctaaagtggaagaaacaaccgagcacctggtcaccaagagcagactgcctctgagagcccagatcaacctg

SEQ ID NO: 22 - DNA, 590 bp, synthetic construct
  source 1..590: mol_type = other DNA
ttaaactggataattctttgttgtgatgggctttcctgtggactgtactatgttggtacacaagaaaaacagtgtactatgtgaatactcactcaaagccagtagcactccctgattgtaacaccaaaaaagtctctcagcattgccaaatgtcccctgtggcagcagaatcactccctgatgagaaccactaccctggagtaaaatctataactatgtcttagaaaataacacagaaaattaatatttctttcactctactccttccattagtgatcaaataaagaaggcatttggcgctacttgccaaattgttggctcaaacttgtgctgaaccttttttggttttctacacttaagtttttttgcctataacccagagaactttgaaaatagagtgtagttaatgtgtatctaatgttactttgtattgacttaattttcccgccttaaatccacagcataaaaaatcacatggaaaagacaaagaaaacagaggcatcaacacactggaacggtccaaggtcgaggaaacaaccgagcacctggtcaccaagagcagactgcctctgagagcccagatcaacctg

SEQ ID NO: 23 - DNA, 500 bp, synthetic construct
  source 1..500: mol_type = other DNA
aaaaaatcacatggaaaagacaaagaaaacagaggcattaacacactggagaggtctaaagtggaagaaactacagagcacttggttacaaagagcagattacctctgcgagcccagatcaacctttaattcacttgggggttggcaattttatttttaaagaaaacttaaaaataaaacctgaaaccccagaacttgagccttgtgtatagattttaaaagaatatatatatcagccgggcgcggtggctcatgcctgtaatcccagcactttgggaggctgaggcgggtggattgcttgagcccaggagtttgagaccagcctggccaacgtggcaaaacctcgtctctgttaaaaattagccgggcgtggtggcacactcctgtaatcccagctactggggaggctgaggcacgagaatcacttgaacccaggaagcggggttgcagtgagccaaaggtacaccactacactccagcctgggcaacagagcaagact

SEQ ID NO: 24 - DNA, 500 bp, synthetic construct
  source 1..500: mol_type = other DNA
aactacagagcacttggctacatagagcagattacctctgcgagcccagatcaacctttaattcacttgggggttggcaattttatttttaaagaaaacttaaaaataaaacctgaaaccccagaacttgagccttgtgtatagattttaaaagaatatatatatcagccgggcgcggtggctcatgcctgtaatcccagcactttgggaggctgaggcgggtggattgcttgagcccaggagtttgagaccagcctggccaacgtggcaaaacctcgtctctgttaaaaattagccgggcgtggtggcacactcctgtaatcccagctactggggaggctgaggcacgagaatcacttgaacccaggaagcggggttgcagtgagccaaaggtacaccactacactccagcctgggcaacagagcaagactcggtctcaaaaacaaaatttaaaaaagatataaggcagtactgtaaattcagttgaattttgatatct

SEQ ID NO: 25 - DNA, 500 bp, synthetic construct
  source 1..500: mol_type = other DNA
attaacacactggagagttctgaagtggaagaaactacagagcacttggttacaaagagcagattacctctgcgagcccagatcaacctttaattcacttgggggttggcaattttatttttaaagaaaacttaaaaataaaacctgaaaccccagaacttgagccttgtgtatagattttaaaagaatatatatatcagccgggcgcggtggctcatgcctgtaatcccagcactttgggaggctgaggcgggtggattgcttgagcccaggagtttgagaccagcctggccaacgtggcaaaacctcgtctctgttaaaaattagccgggcgtggtggcacactcctgtaatcccagctactggggaggctgaggcacgagaatcacttgaacccaggaagcggggttgcagtgagccaaaggtacaccactacactccagcctgggcaacagagcaagactcggtctcaaaaacaaaatttaaaaaagatataaggc

SEQ ID NO: 26 - DNA, 51 bp, synthetic construct
  source 1..51: mol_type = other DNA
gcggccgcgtcgagtctagagggcccgtttaaacccgctgatcagcctcga

SEQ ID NO: 27 - DNA, 122 bp, synthetic construct
  source 1..122: mol_type = other DNA
aacttgtttattgcagcttataatggttacaaataaagcaatagcatcacaaatttcacaaataaagcatttttttcactgcattctagttgtggtttgtccaaactcatcaatgtatctta

SEQ ID NO: 28 - DNA, 225 bp, synthetic construct
  source 1..225: mol_type = other DNA
ctgtgccttctagttgccagccatctgttgtttgcccctcccccgtgccttccttgaccctggaaggtgccactcccactgtcctttcctaataaaatgaggaaattgcatcgcattgtctgagtaggtgtcattctattctggggggtggggtggggcaggacagcaagggggaggattgggaagacaatagcaggcatgctggggatgcggtgggctctatgg

SEQ ID NO: 29 - protein, 18 aa, synthetic construct
EGRGSLLTCGDVEENPGP

SEQ ID NO: 30 - protein, 19 aa, synthetic construct
ATNFSLLKQAGDVEENPGP

SEQ ID NO: 31 - protein, 20 aa, synthetic construct
QCTNYALLKLAGDVESNPGP

SEQ ID NO: 32 - protein, 22 aa, synthetic construct
VKQTLNFDLLKLAGDVESNPGP

SEQ ID NO: 33 - DNA, 54 bp, synthetic construct
  source 1..54: mol_type = other DNA
gagggcagaggaagtcttctaacatgcggtgacgtggaggagaatcctggcccg

SEQ ID NO: 34 - DNA, 66 bp, synthetic construct
  source 1..66: mol_type = other DNA
ggaagcggagctactaacttcagcctgctgaagcaggctggagacgtggaggagaaccctggacct

SEQ ID NO: 35 - DNA, 60 bp, synthetic construct
  source 1..60: mol_type = other DNA
cagtgtactaattatgctctcttgaaattggctggagatgttgagagcaaccctggacct

SEQ ID NO: 36 - DNA, 66 bp, synthetic construct
  source 1..66: mol_type = other DNA
gtgaaacagactttgaattttgaccttctcaagttggcgggagacgtggagtccaaccctggacct

SEQ ID NO: 37 - DNA, 574 bp, synthetic construct
  source 1..574: mol_type = other DNA
cccctctccctcccccccccctaacgttactggccgaagccgcttggaataaggccggtgtgcgtttgtctatatgttattttccaccatattgccgtcttttggcaatgtgagggcccggaaacctggccctgtcttcttgacgagcattcctaggggtctttcccctctcgccaaaggaatgcaaggtctgttgaatgtcgtgaaggaagcagttcctctggaagcttcttgaagacaaacaacgtctgtagcgaccctttgcaggcagcggaaccccccacctggcgacaggtgcctctgcggccaaaagccacgtgtataagatacacctgcaaaggcggcacaaccccagtgccacgttgtgagttggatagttgtggaaagagtcaaatggctctcctcaagcgtattcaacaaggggctgaaggatgcccagaaggtaccccattgtatgggatctgatctggggcctcggtgcacatgctttacatgtgtttagtcgaggttaaaaaaacgtctaggccccccgaaccacggggacgtggttttcctttgaaaaacacgatgataa

SEQ ID NO: 38 - DNA, 2867 bp, synthetic construct
  source 1..2867: mol_type = other DNA
gaagactgtggatggcccctccgggaaactgtggcgtgatggccgcggggctctccagaacatcatccctgcctctactggcgctgccaaggctgtgggcaaggtcatccctgagctgaacgggaagctcactggcatggccttccgtgtccccactgccaacgtgtcagtggtggacctgacctgccgtctagaaaaacctgccaaatatgatgacatcaagaaggtggtgaagcaggcgtcggagggccccctcaagggcatcctgggctacactgagcaccaggtggtctcctctgacttcaacagcgacacccactcctccacctttgacgctggggctggcattgccctcaacgaccactttgtcaagctcatttcctggtatgtggctggggccagagactggctcttaaaaagtgcagggtctggcgccctctggtggctggctcagaaaaagggccctgacaactctttacatcttctaggtatgacaacgagttcggatatagcaatagagtggtcgatctgatggctcatatggctagcaaagaggagggcagaggaagtcttctaacatgcggtgacgtggaggagaatcctggcccgatggtgagcaagggcgaggagctgttcaccggggtggtgcccatcctggtcgagctggacggcgacgtaaacggccacaagttcagcgtgtccggcgagggcgagggcgatgccacctacggcaagctgaccctgaagttcatctgcaccaccggcaagctgcccgtgccctggcccaccctcgtgaccaccctgacctacggcgtgcagtgcttcagccgctaccccgaccacatgaagcagcacgacttcttcaagtccgccatgcccgaaggctacgtccaggagcgcaccatcttcttcaaggacgacggcaactacaagacccgcgccgaggtgaagttcgagggcgacaccctggtgaaccgcatcgagctgaagggcatcgacttcaaggaggacggcaacatcctggggcacaagctggagtacaactacaacagccacaacgtctatatcatggccgacaagcagaagaacggcatcaaggtgaacttcaagatccgccacaacatcgaggacggcagcgtgcagctcgccgaccactaccagcagaacacccccatcggcgacggccccgtgctgctgcccgacaaccactacctgagcacccagtccgccctgagcaaagaccccaacgagaagcgcgatcacatggtcctgctggagttcgtgaccgccgccgggatcactctcggcatggacgagctgtacaaggagggcagaggaagtcttctaacatgcggtgacgtggaggagaatcctggcccgatggtgagcaagggcgaggaggataacatggccatcatcaaggagttcatgcgcttcaaggtgcacatggagggctccgtgaacggccacgagttcgagatcgagggcgagggcgagggccgcccctacgagggcacccagaccgccaagctgaaggtgaccaagggtggccccctgcccttcgcctgggacatcctgtcccctcagttcatgtacggctccaaggcctacgtgaagcaccccgccgacatccccgactacttgaagctgtccttccccgagggcttcaagtgggagcgcgtgatgaacttcgaggacggcggcgtggtgaccgtgacccaggactcctccctgcaggacggcgagttcatctacaaggtgaagctgcgcggcaccaacttcccctccgacggccccgtaatgcagaagaagacaatgggctgggaggcctcctccgagcggatgtaccccgaggacggcgccctgaagggcgagatcaagcagaggctgaagctgaaggacggcggccactacgacgctgaggtcaagaccacctacaaggccaagaagcccgtgcagctgcccggcgcctacaacgtcaacatcaagttggacatcacctcccacaacgaggactacaccatcgtggaacagtacgaacgcgccgagggccgccactccaccggcggcatggacgagctgtacaagtaagcggccgcgtcgagtctagagggcccgtttaaacccgctgatcagcctcgactgtgccttctagttgccagccatctgttgtttgcccctcccccgtgccttccttgaccctggaaggtgccactcccactgtcctttcctaataaaatgaggaaattgcatcgcattgtctgagtaggtgtcattctattctggggggtggggtggggcaggacagcaagggggaggattgggaagacaatagcaggcatgctggggatgcggtgggctctatggatttggctacagcaacagggtggtggacctcatggcccacatggcctccaaggagtaagacccctggaccaccagccccagcaagagcacaagaggaagagagagaccctcactgctggggagtccctgccacactcagtcccccaccacactgaatctcccctcctcacagttgccatgtagaccccttgaagaggggaggggcctagggagccgcaccttgtcatgtaccatcaataaagtaccctgtgctcaaccagttacttgtcctgtcttattctagggtctggggcagaggggagggaagctgggcttgtgtcaaggtgagacattcttgctggggagggacctggtatgttctcctcagactgagggtagggcctccaaacagccttgcttgcttcgagaaccatttgcttcccgctcagacgtcttgagtgctacaggaagctggcaccactacttcagagaacaaggccttttcctctcctcgctccagt

SEQ ID NO: 39 - DNA, 3402 bp, synthetic construct
  source 1..3402: mol_type = other DNA
gaagactgtggatggcccctccgggaaactgtggcgtgatggccgcggggctctccagaacatcatccctgcctctactggcgctgccaaggctgtgggcaaggtcatccctgagctgaacgggaagctcactggcatggccttccgtgtccccactgccaacgtgtcagtggtggacctgacctgccgtctagaaaaacctgccaaatatgatgacatcaagaaggtggtgaagcaggcgtcggagggccccctcaagggcatcctgggctacactgagcaccaggtggtctcctctgacttcaacagcgacacccactcctccacctttgacgctggggctggcattgccctcaacgaccactttgtcaagctcatttcctggtatgtggctggggccagagactggctcttaaaaagtgcagggtctggcgccctctggtggctggctcagaaaaagggccctgacaactctttacatcttctaggtatgacaacgagttcggatatagcaatagagtggtcgatctgatggctcatatggctagcaaagagggaagcggagctactaacttcagcctgctgaagcaggctggagacgtggaggagaaccctggacctatggtgagcaagggcgaggagctgttcaccggggtggtgcccatcctggtcgagctggacggcgacgtaaacggccacaagttcagcgtgtccggcgagggcgagggcgatgccacctacggcaagctgaccctgaagttcatctgcaccaccggcaagctgcccgtgccctggcccaccctcgtgaccaccctgacctacggcgtgcagtgcttcagccgctaccccgaccacatgaagcagcacgacttcttcaagtccgccatgcccgaaggctacgtccaggagcgcaccatcttcttcaaggacgacggcaactacaagacccgcgccgaggtgaagttcgagggcgacaccctggtgaaccgcatcgagctgaagggcatcgacttcaaggaggacggcaacatcctggggcacaagctggagtacaactacaacagccacaacgtctatatcatggccgacaagcagaagaacggcatcaaggtgaacttcaagatccgccacaacatcgaggacggcagcgtgcagctcgccgaccactaccagcagaacacccccatcggcgacggccccgtgctgctgcccgacaaccactacctgagcacccagtccgccctgagcaaagaccccaacgagaagcgcgatcacatggtcctgctggagttcgtgaccgccgccgggatcactctcggcatggacgagctgtacaagtaacccctctccctcccccccccctaacgttactggccgaagccgcttggaataaggccggtgtgcgtttgtctatatgttattttccaccatattgccgtcttttggcaatgtgagggcccggaaacctggccctgtcttcttgacgagcattcctaggggtctttcccctctcgccaaaggaatgcaaggtctgttgaatgtcgtgaaggaagcagttcctctggaagcttcttgaagacaaacaacgtctgtagcgaccctttgcaggcagcggaaccccccacctggcgacaggtgcctctgcggccaaaagccacgtgtataagatacacctgcaaaggcggcacaaccccagtgccacgttgtgagttggatagttgtggaaagagtcaaatggctctcctcaagcgtattcaacaaggggctgaaggatgcccagaaggtaccccattgtatgggatctgatctggggcctcggtgcacatgctttacatgtgtttagtcgaggttaaaaaaacgtctaggccccccgaaccacggggacgtggttttcctttgaaaaacacgatgataaatggtgagcaagggcgaggaggataacatggccatcatcaaggagttcatgcgcttcaaggtgcacatggagggctccgtgaacggccacgagttcgagatcgagggcgagggcgagggccgcccctacgagggcacccagaccgccaagctgaaggtgaccaagggtggccccctgcccttcgcctgggacatcctgtcccctcagttcatgtacggctccaaggcctacgtgaagcaccccgccgacatccccgactacttgaagctgtccttccccgagggcttcaagtgggagcgcgtgatgaacttcgaggacggcggcgtggtgaccgtgacccaggactcctccctgcaggacggcgagttcatctacaaggtgaagctgcgcggcaccaacttcccctccgacggccccgtaatgcagaagaagacaatgggctgggaggcctcctccgagcggatgtaccccgaggacggcgccctgaagggcgagatcaagcagaggctgaagctgaaggacggcggccactacgacgctgaggtcaagaccacctacaaggccaagaagcccgtgcagctgcccggcgcctacaacgtcaacatcaagttggacatcacctcccacaacgaggactacaccatcgtggaacagtacgaacgcgccgagggccgccactccaccggcggcatggacgagctgtacaagtaagcggccgcgtcgagtctagagggcccgtttaaacccgctgatcagcctcgactgtgccttctagttgccagccatctgttgtttgcccctcccccgtgccttccttgaccctggaaggtgccactcccactgtcctttcctaataaaatgaggaaattgcatcgcattgtctgagtaggtgtcattctattctggggggtggggtggggcaggacagcaagggggaggattgggaagacaatagcaggcatgctggggatgcggtgggctctatggatttggctacagcaacagggtggtggacctcatggcccacatggcctccaaggagtaagacccctggaccaccagccccagcaagagcacaagaggaagagagagaccctcactgctggggagtccctgccacactcagtcccccaccacactgaatctcccctcctcacagttgccatgtagaccccttgaagaggggaggggcctagggagccgcaccttgtcatgtaccatcaataaagtaccctgtgctcaaccagttacttgtcctgtcttattctagggtctggggcagaggggagggaagctgggcttgtgtcaaggtgagacattcttgctggggagggacctggtatgttctcctcagactgagggtagggcctccaaacagccttgcttgcttcgagaaccatttgcttcccgctcagacgtcttgagtgctacaggaagctggcaccactacttcagagaacaaggccttttcctctcctcgctccagt

SEQ ID NO: 40 - DNA, 2891 bp, synthetic construct
  source 1..2891: mol_type = other DNA
gaagactgtggatggcccctccgggaaactgtggcgtgatggccgcggggctctccagaacatcatccctgcctctactggcgctgccaaggctgtgggcaaggtcatccctgagctgaacgggaagctcactggcatggccttccgtgtccccactgccaacgtgtcagtggtggacctgacctgccgtctagaaaaacctgccaaatatgatgacatcaagaaggtggtgaagcaggcgtcggagggccccctcaagggcatcctgggctacactgagcaccaggtggtctcctctgacttcaacagcgacacccactcctccacctttgacgctggggctggcattgccctcaacgaccactttgtcaagctcatttcctggtatgtggctggggccagagactggctcttaaaaagtgcagggtctggcgccctctggtggctggctcagaaaaagggccctgacaactctttacatcttctaggtatgacaacgagttcggatatagcaatagagtggtcgatctgatggctcatatggctagcaaagagggaagcggagctactaacttcagcctgctgaagcaggctggagacgtggaggagaaccctggacctatggtgagcaagggcgaggagctgttcaccggggtggtgcccatcctggtcgagctggacggcgacgtaaacggccacaagttcagcgtgtccggcgagggcgagggcgatgccacctacggcaagctgaccctgaagttcatctgcaccaccggcaagctgcccgtgccctggcccaccctcgtgaccaccctgacctacggcgtgcagtgcttcagccgctaccccgaccacatgaagcagcacgacttcttcaagtccgccatgcccgaaggctacgtccaggagcgcaccatcttcttcaaggacgacggcaactacaagacccgcgccgaggtgaagttcgagggcgacaccctggtgaaccgcatcgagctgaagggcatcgacttcaaggaggacggcaacatcctggggcacaagctggagtacaactacaacagccacaacgtctatatcatggccgacaagcagaagaacggcatcaaggtgaacttcaagatccgccacaacatcgaggacggcagcgtgcagctcgccgaccactaccagcagaacacccccatcggcgacggccccgtgctgctgcccgacaaccactacctgagcacccagtccgccctgagcaaagaccccaacgagaagcgcgatcacatggtcctgctggagttcgtgaccgccgccgggatcactctcggcatggacgagctgtacaagggaagcggagctactaacttcagcctgctgaagcaggctggagacgtggaggagaaccctggacctatggtgagcaagggcgaggaggataacatggccatcatcaaggagttcatgcgcttcaaggtgcacatggagggctccgtgaacggccacgagttcgagatcgagggcgagggcgagggccgcccctacgagggcacccagaccgccaagctgaaggtgaccaagggtggccccctgcccttcgcctgggacatcctgtcccctcagttcatgtacggctccaaggcctacgtgaagcaccccgccgacatccccgactacttgaagctgtccttccccgagggcttcaagtgggagcgcgtgatgaacttcgaggacggcggcgtggtgaccgtgacccaggactcctccctgcaggacggcgagttcatctacaaggtgaagctgcgcggcaccaacttcccctccgacggccccgtaatgcagaagaagacaatgggctgggaggcctcctccgagcggatgtaccccgaggacggcgccctgaagggcgagatcaagcagaggctgaagctgaaggacggcggccactacgacgctgaggtcaagaccacctacaaggccaagaagcccgtgcagctgcccggcgcctacaacgtcaacatcaagttggacatcacctcccacaacgaggactacaccatcgtggaacagtacgaacgcgccgagggccgccactccaccggcggcatggacgagctgtacaagtaagcggccgcgtcgagtctagagggcccgtttaaacccgctgatcagcctcgactgtgccttctagttgccagccatctgttgtttgcccctcccccgtgccttccttgaccctggaaggtgccactcccactgtcctttcctaataaaatgaggaaattgcatcgcattgtctgagtaggtgtcattctattctggggggtggggtggggcaggacagcaagggggaggattgggaagacaatagcaggcatgctggggatgcggtgggctctatggatttggctacagcaacagggtggtggacctcatggcccacatggcctccaaggagtaagacccctggaccaccagccccagcaagagcacaagaggaagagagagaccctcactgctggggagtccctgccacactcagtcccccaccacactgaatctcccctcctcacagttgccatgtagaccccttgaagaggggaggggcctagggagccgcaccttgtcatgtaccatcaataaagtaccctgtgctcaaccagttacttgtcctgtcttattctagggtctggggcagaggggagggaagctgggcttgtgtcaaggtgagacattcttgctggggagggacctggtatgttctcctcagactgagggtagggcctccaaacagccttgcttgcttcgagaaccatttgcttcccgctcagacgtcttgagtgctacaggaagctggcaccactacttcagagaacaaggccttttcctctcctcgctccagt

SEQ ID NO: 41 - DNA, 2879 bp, synthetic construct
  source 1..2879: mol_type = other DNA
gaagactgtggatggcccctccgggaaactgtggcgtgatggccgcggggctctccagaacatcatccctgcctctactggcgctgccaaggctgtgggcaaggtcatccctgagctgaacgggaagctcactggcatggccttccgtgtccccactgccaacgtgtcagtggtggacctgacctgccgtctagaaaaacctgccaaatatgatgacatcaagaaggtggtgaagcaggcgtcggagggccccctcaagggcatcctgggctacactgagcaccaggtggtctcctctgacttcaacagcgacacccactcctccacctttgacgctggggctggcattgccctcaacgaccactttgtcaagctcatttcctggtatgtggctggggccagagactggctcttaaaaagtgcagggtctggcgccctctggtggctggctcagaaaaagggccctgacaactctttacatcttctaggtatgacaacgagttcggatatagcaatagagtggtcgatctgatggctcatatggctagcaaagagggaagcggagctactaacttcagcctgctgaagcaggctggagacgtggaggagaaccctggacctatggtgagcaagggcgaggagctgttcaccggggtggtgcccatcctggtcgagctggacggcgacgtaaacggccacaagttcagcgtgtccggcgagggcgagggcgatgccacctacggcaagctgaccctgaagttcatctgcaccaccggcaagctgcccgtgccctggcccaccctcgtgaccaccctgacctacggcgtgcagtgcttcagccgctaccccgaccacatgaagcagcacgacttcttcaagtccgccatgcccgaaggctacgtccaggagcgcaccatcttcttcaaggacgacggcaactacaagacccgcgccgaggtgaagttcgagggcgacaccctggtgaaccgcatcgagctgaagggcatcgacttcaaggaggacggcaacatcctggggcacaagctggagtacaactacaacagccacaacgtctatatcatggccgacaagcagaagaacggcatcaaggtgaacttcaagatccgccacaacatcgaggacggcagcgtgcagctcgccgaccactaccagcagaacacccccatcggcgacggccccgtgctgctgcccgacaaccactacctgagcacccagtccgccctgagcaaagaccccaacgagaagcgcgatcacatggtcctgctggagttcgtgaccgccgccgggatcactctcggcatggacgagctgtacaaggagggcagaggaagtcttctaacatgcggtgacgtggaggagaatcctggcccgatggtgagcaagggcgaggaggataacatggccatcatcaaggagttcatgcgcttcaaggtgcacatggagggctccgtgaacggccacgagttcgagatcgagggcgagggcgagggccgcccctacgagggcacccagaccgccaagctgaaggtgaccaagggtggccccctgcccttcgcctgggacatcctgtcccctcagttcatgtacggctccaaggcctacgtgaagcaccccgccgacatccccgactacttgaagctgtccttccccgagggcttcaagtgggagcgcgtgatgaacttcgaggacggcggcgtggtgaccgtgacccaggactcctccctgcaggacggcgagttcatctacaaggtgaagctgcgcggcaccaacttcccctccgacggccccgtaatgcagaagaagacaatgggctgggaggcctcctccgagcggatgtaccccgaggacggcgccctgaagggcgagatcaagcagaggctgaagctgaaggacggcggccactacgacgctgaggtcaagaccacctacaaggccaagaagcccgtgcagctgcccggcgcctacaacgtcaacatcaagttggacatcacctcccacaacgaggactacaccatcgtggaacagtacgaacgcgccgagggccgccactccaccggcggcatggacgagctgtacaagtaagcggccgcgtcgagtctagagggcccgtttaaacccgctgatcagcctcgactgtgccttctagttgccagccatctgttgtttgcccctcccccgtgccttccttgaccctggaaggtgccactcccactgtcctttcctaataaaatgaggaaattgcatcgcattgtctgagtaggtgtcattctattctggggggtggggtggggcaggacagcaagggggaggattgggaagacaatagcaggcatgctggggatgcggtgggctctatggatttggctacagcaacagggtggtggacctcatggcccacatggcctccaaggagtaagacccctggaccaccagccccagcaagagcacaagaggaagagagagaccctcactgctggggagtccctgccacactcagtcccccaccacactgaatctcccctcctcacagttgccatgtagaccccttgaagaggggaggggcctagggagccgcaccttgtcatgtaccatcaataaagtaccctgtgctcaaccagttacttgtcctgtcttattctagggtctggggcagaggggagggaagctgggcttgtgtcaaggtgagacattcttgctggggagggacctggtatgttctcctcagactgagggtagggcctccaaacagccttgcttgcttcgagaaccatttgcttcccgctcagacgtcttgagtgctacaggaagctggcaccactacttcagagaacaaggccttttcctctcctcgctccagt

SEQ ID NO: 42 - DNA, 2879 bp, synthetic construct
  source 1..2879: mol_type = other DNA
gaagactgtggatggcccctccgggaaactgtggcgtgatggccgcggggctctccagaacatcatccctgcctctactggcgctgccaaggctgtgggcaaggtcatccctgagctgaacgggaagctcactggcatggccttccgtgtccccactgccaacgtgtcagtggtggacctgacctgccgtctagaaaaacctgccaaatatgatgacatcaagaaggtggtgaagcaggcgtcggagggccccctcaagggcatcctgggctacactgagcaccaggtggtctcctctgacttcaacagcgacacccactcctccacctttgacgctggggctggcattgccctcaacgaccactttgtcaagctcatttcctggtatgtggctggggccagagactggctcttaaaaagtgcagggtctggcgccctctggtggctggctcagaaaaagggccctgacaactctttacatcttctaggtatgacaacgagttcggatatagcaatagagtggtcgatctgatggctcatatggctagcaaagaggagggcagaggaagtcttctaacatgcggtgacgtggaggagaatcctggcccgatggtgagcaagggcgaggagctgttcaccggggtggtgcccatcctggtcgagctggacggcgacgtaaacggccacaagttcagcgtgtccggcgagggcgagggcgatgccacctacggcaagctgaccctgaagttcatctgcaccaccggcaagctgcccgtgccctggcccaccctcgtgaccaccctgacctacggcgtgcagtgcttcagccgctaccccgaccacatgaagcagcacgacttcttcaagtccgccatgcccgaaggctacgtccaggagcgcaccatcttcttcaaggacgacggcaactacaagacccgcgccgaggtgaagttcgagggcgacaccctggtgaaccgcatcgagctgaagggcatcgacttcaaggaggacggcaacatcctggggcacaagctggagtacaactacaacagccacaacgtctatatcatggccgacaagcagaagaacggcatcaaggtgaacttcaagatccgccacaacatcgaggacggcagcgtgcagctcgccgaccactaccagcagaacacccccatcggcgacggccccgtgctgctgcccgacaaccactacctgagcacccagtccgccctgagcaaagaccccaacgagaagcgcgatcacatggtcctgctggagttcgtgaccgccgccgggatcactctcggcatggacgagctgtacaagggaagcggagctactaacttcagcctgctgaagcaggctggagacgtggaggagaaccctggacctatggtgagcaagggcgaggaggataacatggccatcatcaaggagttcatgcgcttcaaggtgcacatggagggctccgtgaacggccacgagttcgagatcgagggcgagggcgagggccgcccctacgagggcacccagaccgccaagctgaaggtgaccaagggtggccccctgcccttcgcctgggacatcctgtcccctcagttcatgtacggctccaaggcctacgtgaagcaccccgccgacatccccgactacttgaagctgtccttccccgagggcttcaagtgggagcgcgtgatgaacttcgaggacggcggcgtggtgaccgtgacccaggactcctccctgcaggacggcgagttcatctacaaggtgaagctgcgcggcaccaacttcccctccgacggccccgtaatgcagaagaagacaatgggctgggaggcctcctccgagcggatgtaccccgaggacggcgccctgaagggcgagatcaagcagaggctgaagctgaaggacggcggccactacgacgctgaggtcaagaccacctacaaggccaagaagcccgtgcagctgcccggcgcctacaacgtcaacatcaagttggacatcacctcccacaacgaggactacaccatcgtggaacagtacgaacgcgccgagggccgccactccaccggcggcatggacgagctgtacaagtaagcggccgcgtcgagtctagagggcccgtttaaacccgctgatcagcctcgactgtgccttctagttgccagccatctgttgtttgcccctcccccgtgccttccttgaccctggaaggtgccactcccactgtcctttcctaataaaatgaggaaattgcatcgcattgtctgagtaggtgtcattctattctggggggtggggtggggcaggacagcaagggggaggattgggaagacaatagcaggcatgctggggatgcggtgggctctatggatttggctacagcaacagggtggtggacctcatggcccacatggcctccaaggagtaagacccctggaccaccagccccagcaagagcacaagaggaagagagagaccctcactgctggggagtccctgccacactcagtcccccaccacactgaatctcccctcctcacagttgccatgtagaccccttgaagaggggaggggcctagggagccgcaccttgtcatgtaccatcaataaagtaccctgtgctcaaccagttacttgtcctgtcttattctagggtctggggcagaggggagggaagctgggcttgtgtcaaggtgagacattcttgctggggagggacctggtatgttctcctcagactgagggtagggcctccaaacagccttgcttgcttcgagaaccatttgcttcccgctcagacgtcttgagtgctacaggaagctggcaccactacttcagagaacaaggccttttcctctcctcgctccagt

SEQ ID NO: 43 - DNA, 3390 bp, synthetic construct
  source 1..3390: mol_type = other DNA
gaagactgtggatggcccctccgggaaactgtggcgtgatggccgcggggctctccagaacatcatccctgcctctactggcgctgccaaggctgtgggcaaggtcatccctgagctgaacgggaagctcactggcatggccttccgtgtccccactgccaacgtgtcagtggtggacctgacctgccgtctagaaaaacctgccaaatatgatgacatcaagaaggtggtgaagcaggcgtcggagggccccctcaagggcatcctgggctacactgagcaccaggtggtctcctctgacttcaacagcgacacccactcctccacctttgacgctggggctggcattgccctcaacgaccactttgtcaagctcatttcctggtatgtggctggggccagagactggctcttaaaaagtgcagggtctggcgccctctggtggctggctcagaaaaagggccctgacaactctttacatcttctaggtatgacaacgagttcggatatagcaatagagtggtcgatctgatggctcatatggctagcaaagaggagggcagaggaagtcttctaacatgcggtgacgtggaggagaatcctggcccgatggtgagcaagggcgaggagctgttcaccggggtggtgcccatcctggtcgagctggacggcgacgtaaacggccacaagttcagcgtgtccggcgagggcgagggcgatgccacctacggcaagctgaccctgaagttcatctgcaccaccggcaagctgcccgtgccctggcccaccctcgtgaccaccctgacctacggcgtgcagtgcttcagccgctaccccgaccacatgaagcagcacgacttcttcaagtccgccatgcccgaaggctacgtccaggagcgcaccatcttcttcaaggacgacggcaactacaagacccgcgccgaggtgaagttcgagggcgacaccctggtgaaccgcatcgagctgaagggcatcgacttcaaggaggacggcaacatcctggggcacaagctggagtacaactacaacagccacaacgtctatatcatggccgacaagcagaagaacggcatcaaggtgaacttcaagatccgccacaacatcgaggacggcagcgtgcagctcgccgaccactaccagcagaacacccccatcggcgacggccccgtgctgctgcccgacaaccactacctgagcacccagtccgccctgagcaaagaccccaacgagaagcgcgatcacatggtcctgctggagttcgtgaccgccgccgggatcactctcggcatggacgagctgtacaagtaacccctctccctcccccccccctaacgttactggccgaagccgcttggaataaggccggtgtgcgtttgtctatatgttattttccaccatattgccgtcttttggcaatgtgagggcccggaaacctggccctgtcttcttgacgagcattcctaggggtctttcccctctcgccaaaggaatgcaaggtctgttgaatgtcgtgaaggaagcagttcctctggaagcttcttgaagacaaacaacgtctgtagcgaccctttgcaggcagcggaaccccccacctggcgacaggtgcctctgcggccaaaagccacgtgtataagatacacctgcaaaggcggcacaaccccagtgccacgttgtgagttggatagttgtggaaagagtcaaatggctctcctcaagcgtattcaacaaggggctgaaggatgcccagaaggtaccccattgtatgggatctgatctggggcctcggtgcacatgctttacatgtgtttagtcgaggttaaaaaaacgtctaggccccccgaaccacggggacgtggttttcctttgaaaaacacgatgataaatggtgagcaagggcgaggaggataacatggccatcatcaaggagttcatgcgcttcaaggtgcacatggagggctccgtgaacggccacgagttcgagatcgagggcgagggcgagggccgcccctacgagggcacccagaccgccaagctgaaggtgaccaagggtggccccctgcccttcgcctgggacatcctgtcccctcagttcatgtacggctccaaggcctacgtgaagcaccccgccgacatccccgactacttgaagctgtccttccccgagggcttcaagtgggagcgcgtgatgaacttcgaggacggcggcgtggtgaccgtgacccaggactcctccctgcaggacggcgagttcatctacaaggtgaagctgcgcggcaccaacttcccctccgacggccccgtaatgcagaagaagacaatgggctgggaggcctcctccgagcggatgtaccccgaggacggcgccctgaagggcgagatcaagcagaggctgaagctgaaggacggcggccactacgacgctgaggtcaagaccacctacaaggccaagaagcccgtgcagctgcccggcgcctacaacgtcaacatcaagttggacatcacctcccacaacgaggactacaccatcgtggaacagtacgaacgcgccgagggccgccactccaccggcggcatggacgagctgtacaagtaagcggccgcgtcgagtctagagggcccgtttaaacccgctgatcagcctcgactgtgccttctagttgccagccatctgttgtttgcccctcccccgtgccttccttgaccctggaaggtgccactcccactgtcctttcctaataaaatgaggaaattgcatcgcattgtctgagtaggtgtcattctattctggggggtggggtggggcaggacagcaagggggaggattgggaagacaatagcaggcatgctggggatgcggtgggctctatggatttggctacagcaacagggtggtggacctcatggcccacatggcctccaaggagtaagacccctggaccaccagccccagcaagagcacaagaggaagagagagaccctcactgctggggagtccctgccacactcagtcccccaccacactgaatctcccctcctcacagttgccatgtagaccccttgaagaggggaggggcctagggagccgcaccttgtcatgtaccatcaataaagtaccctgtgctcaaccagttacttgtcctgtcttattctagggtctggggcagaggggagggaagctgggcttgtgtcaaggtgagacattcttgctggggagggacctggtatgttctcctcagactgagggtagggcctccaaacagccttgcttgcttcgagaaccatttgcttcccgctcagacgtcttgagtgctacaggaagctggcaccactacttcagagaacaaggccttttcctctcctcgctccagt

SEQ ID NO: 44 - DNA, 2117 bp, synthetic construct
  source 1..2117: mol_type = other DNA
gaagactgtggatggcccctccgggaaactgtggcgtgatggccgcggggctctccagaacatcatccctgcctctactggcgctgccaaggctgtgggcaaggtcatccctgagctgaacgggaagctcactggcatggccttccgtgtccccactgccaacgtgtcagtggtggacctgacctgccgtctagaaaaacctgccaaatatgatgacatcaagaaggtggtgaagcaggcgtcggagggccccctcaagggcatcctgggctacactgagcaccaggtggtctcctctgacttcaacagcgacacccactcctccacctttgacgctggggctggcattgccctcaacgaccactttgtcaagctcatttcctggtatgtggctggggccagagactggctcttaaaaagtgcagggtctggcgccctctggtggctggctcagaaaaagggccctgacaactctttacatcttctaggtatgacaacgagttcggatatagcaatagagtggtcgatctgatggctcatatggctagcaaagagggaagcggagctactaacttcagcctgctgaagcaggctggagacgtggaggagaaccctggacctatggtgagcaagggcgaggagctgttcaccggggtggtgcccatcctggtcgagctggacggcgacgtaaacggccacaagttcagcgtgtccggcgagggcgagggcgatgccacctacggcaagctgaccctgaagttcatctgcaccaccggcaagctgcccgtgccctggcccaccctcgtgaccaccctgacctacggcgtgcagtgcttcagccgctaccccgaccacatgaagcagcacgacttcttcaagtccgccatgcccgaaggctacgtccaggagcgcaccatcttcttcaaggacgacggcaactacaagacccgcgccgaggtgaagttcgagggcgacaccctggtgaaccgcatcgagctgaagggcatcgacttcaaggaggacggcaacatcctggggcacaagctggagtacaactacaacagccacaacgtctatatcatggccgacaagcagaagaacggcatcaaggtgaacttcaagatccgccacaacatcgaggacggcagcgtgcagctcgccgaccactaccagcagaacacccccatcggcgacggccccgtgctgctgcccgacaaccactacctgagcacccagtccgccctgagcaaagaccccaacgagaagcgcgatcacatggtcctgctggagttcgtgaccgccgccgggatcactctcggcatggacgagctgtacaagtgagcggccgcgtcgagtctagagggcccgtttaaacccgctgatcagcctcgactgtgccttctagttgccagccatctgttgtttgcccctcccccgtgccttccttgaccctggaaggtgccactcccactgtcctttcctaataaaatgaggaaattgcatcgcattgtctgagtaggtgtcattctattctggggggtggggtggggcaggacagcaagggggaggattgggaagacaatagcaggcatgctggggatgcggtgggctctatggatttggctacagcaacagggtggtggacctcatggcccacatggcctccaaggagtaagacccctggaccaccagccccagcaagagcacaagaggaagagagagaccctcactgctggggagtccctgccacactcagtcccccaccacactgaatctcccctcctcacagttgccatgtagaccccttgaagaggggaggggcctagggagccgcaccttgtcatgtaccatcaataaagtaccctgtgctcaaccagttacttgtcctgtcttattctagggtctggggcagaggggagggaagctgggcttgtgtcaaggtgagacattcttgctggggagggacctggtatgttctcctcagactgagggtagggcctccaaacagccttgcttgcttcgagaaccatttgcttcccgctcagacgtcttgagtgctacaggaagctggcaccactacttcagagaacaaggccttttcctctcctcgctccagt

SEQ ID NO: 45 - DNA, 2585 bp, synthetic construct
  source 1..2585: mol_type = other DNA
gaagactgtggatggcccctccgggaaactgtggcgtgatggccgcggggctctccagaacatcatccctgcctctactggcgctgccaaggctgtgggcaaggtcatccctgagctgaacgggaagctcactggcatggccttccgtgtccccactgccaacgtgtcagtggtggacctgacctgccgtctagaaaaacctgccaaatatgatgacatcaagaaggtggtgaagcaggcgtcggagggccccctcaagggcatcctgggctacactgagcaccaggtggtctcctctgacttcaacagcgacacccactcctccacctttgacgctggggctggcattgccctcaacgaccactttgtcaagctcatttcctggtatgtggctggggccagagactggctcttaaaaagtgcagggtctggcgccctctggtggctggctcagaaaaagggccctgacaactctttacatcttctaggtatgacaacgagttcggatatagcaatagagtggtcgatctgatggctcatatggctagcaaagagggaagcggagctactaacttcagcctgctgaagcaggctggagacgtggaggagaaccctggacctatggattggacctggatcctgtttctggtggccgctgccacaagagtgcacagcaattgggtcaacgtgatcagcgacctgaagaagatcgaggacctgatccagagcatgcacatcgacgccacactgtacaccgagtccgatgtgcaccctagctgcaaagtgaccgccatgaagtgctttctgctggaactgcaagtgatcagcctggaaagcggcgacgccagcatccacgataccgtggaaaacctgatcatcctggccaacaacagcctgagcagcaacggcaatgtgaccgagagcggctgcaaagagtgcgaggaactggaagagaagaacatcaaagagttcctccagagcttcgtccacatcgtgcagatgttcatcaacaccagctctggcggaggaagcggaggcggaggatctggtggtggtggatctggcggcggtggtagtggcggaggttctctgcaaatcacctgtcctccacctatgagcgtggaacacgccgacatctgggtcaagagctacagcctgtacagcagagagcggtacatctgcaacagcggcttcaagagaaaggccggcacaagcagcctgaccgagtgtgtgctgaacaaggccacaaacgtggcccactggaccacacctagcctgaagtgcatcagagatcccgctctggttcatcagaggcctgcccctccatctacagtgacaacagctggcgtgacccctcagcctgagtctctgtctccatctggaaaagagcctgccgccagctctcccagctctaacaatactgctgccaccacagccgctatcgtgcctggatctcagctgatgcctagcaagagccctagcaccggcacaacagagatcagctctcacgagagcagccacggaacaccttctcagaccaccgccaagaattgggagctgacagcctctgcctctcatcagccacctggcgtgtacccacagggccactctgatacaacagtggccatcagcaccagcaccgttctgctgtgtggcctgtctgctgttagcctgctggcctgctacctgaagtctagacagacacctcctctggccagcgtggaaatggaagccatggaagctctgcctgtcacatggggcaccagcagcagagatgaggacctcgagaattgcagccaccacctgtaggcggccgcgtcgagtctagagggcccgtttaaacccgctgatcagcctcgactgtgccttctagttgccagccatctgttgtttgcccctcccccgtgccttccttgaccctggaaggtgccactcccactgtcctttcctaataaaatgaggaaattgcatcgcattgtctgagtaggtgtcattctattctggggggtggggtggggcaggacagcaagggggaggattgggaagacaatagcaggcatgctggggatgcggtgggctctatggatttggctacagcaacagggtggtggacctcatggcccacatggcctccaaggagtaagacccctggaccaccagccccagcaagagcacaagaggaagagagagaccctcactgctggggagtccctgccacactcagtcccccaccacactgaatctcccctcctcacagttgccatgtagaccccttgaagaggggaggggcctagggagccgcaccttgtcatgtaccatcaataaagtaccctgtgctcaaccagttacttgtcctgtcttattctagggtctggggcagaggggagggaagctgggcttgtgtcaaggtgagacattcttgctggggagggacctggtatgttctcctcagactgagggtagggcctccaaacagccttgcttgcttcgagaaccatttgcttcccgctcagacgtcttgagtgctacaggaagctggcaccactacttcagagaacaaggccttttcctctcctcgctccagt

SEQ ID NO: 46 - DNA, 2129 bp, synthetic construct
  source 1..2129: mol_type = other DNA
ggctttcccataatttcctttcaaggtggggagggaggtagaggggtgatgtggggagtacgctgcagggcctcactccttttgcagaccacagtccatgccatcactgccacccagaagactgtggatggcccctccgggaaactgtggcgtgatggccgcggggctctccagaacatcatccctgcctctactggcgctgccaaggctgtgggcaaggtcatccctgagctgaacgggaagctcactggcatggccttccgtgtccccactgccaacgtgtcagtggtggacctgacctgccgtctagaaaaacctgccaaatatgatgacatcaagaaggtggtgaagcaggcgtcggagggccccctcaagggcatcctgggctacactgagcaccaggtggtctcctctgacttcaacagcgacacccactcctccacctttgacgctggggctggcattgccctcaacgaccactttgtcaagctcatctcttggtacgacaatgagttcggatatagcaatagagtggtcgatctgatggctcatatggctagcaaagagggaagcggagctactaacttcagcctgctgaagcaggctggagacgtggaggagaaccctggacctatggtgagcaagggcgaggagctgttcaccggggtggtgcccatcctggtcgagctggacggcgacgtaaacggccacaagttcagcgtgtccggcgagggcgagggcgatgccacctacggcaagctgaccctgaagttcatctgcaccaccggcaagctgcccgtgccctggcccaccctcgtgaccaccctgacctacggcgtgcagtgcttcagccgctaccccgaccacatgaagcagcacgacttcttcaagtccgccatgcccgaaggctacgtccaggagcgcaccatcttcttcaaggacgacggcaactacaagacccgcgccgaggtgaagttcgagggcgacaccctggtgaaccgcatcgagctgaagggcatcgacttcaaggaggacggcaacatcctggggcacaagctggagtacaactacaacagccacaacgtctatatcatggccgacaagcagaagaacggcatcaaggtgaacttcaagatccgccacaacatcgaggacggcagcgtgcagctcgccgaccactaccagcagaacacccccatcggcgacggccccgtgctgctgcccgacaaccactacctgagcacccagtccgccctgagcaaagaccccaacgagaagcgcgatcacatggtcctgctggagttcgtgaccgccgccgggatcactctcggcatggacgagctgtacaagtgagcggccgcgtcgagtctagagggcccgtttaaacccgctgatcagcctcgactgtgccttctagttgccagccatctgttgtttgcccctcccccgtgccttccttgaccctggaaggtgccactcccactgtcctttcctaataaaatgaggaaattgcatcgcattgtctgagtaggtgtcattctattctggggggtggggtggggcaggacagcaagggggaggattgggaagacaatagcaggcatgctggggatgcggtgggctctatggagactggctcttaaaaagtgcagggtctggcgccctctggtggctggctcagaaaaagggccctgacaactcttttcatcttctaggtatgacaacgaatttggctacagcaacagggtggtggacctcatggcccacatggcctccaaggagtaagacccctggaccaccagccccagcaagagcacaagaggaagagagagaccctcactgctggggagtccctgccacactcagtcccccaccacactgaatctcccctcctcacagttgccatgtagaccccttgaagaggggaggggcctagggagccgcaccttgtcatgtaccatcaataaagtaccctgtgctcaaccagttacttgtcctgtcttattctagggtctggggcagaggggagggaagctgggcttgtgtcaaggtgagacattcttgctggggagggacctggtatgttctcctcagactgagggtagggcctccaaacagccttgcttgct

SEQ ID NO: 47 - DNA, 2124 bp, synthetic construct
  source 1..2124: mol_type = other DNA
gcagacttccatttacagtgaggaggtgagcattgcattgaacaaaagatggcgttttcacttggaattagttatctgaagctttaggattcctcagcaatatgattatgagacaagaaaggaagattcagaaatgagtctagttgaaggcagcaattcagagaagaagattcagttgttatcattgccgtcctgcttggtttatggcctggttcaggaccaaggagagaagtgtgaatacatgcctcttgagctatagaatgagacgctggagtcactaagatgattttttaaaagtattgttttataaacaaaaataagattgtgacaagggattccactattaatgttttcatgcctgtgccttaatctgactgggtatggtgagaattgtgcttgcagctttaaggtaagaattttaccatcttaatatgttaagaagtgccatttcagtctctcatctctactccaacttgtcttcttaggtgctaaagtcagagccgaaatctacgaggccttcgagaacatctaccccatcctgaagggcttcagaaagaccaccggaagcggagctactaacttcagcctgctgaagcaggctggagacgtggaggagaaccctggacctatggtgagcaagggcgaggagctgttcaccggggtggtgcccatcctggtcgagctggacggcgacgtaaacggccacaagttcagcgtgtccggcgagggcgagggcgatgccacctacggcaagctgaccctgaagttcatctgcaccaccggcaagctgcccgtgccctggcccaccctcgtgaccaccctgacctacggcgtgcagtgcttcagccgctaccccgaccacatgaagcagcacgacttcttcaagtccgccatgcccgaaggctacgtccaggagcgcaccatcttcttcaaggacgacggcaactacaagacccgcgccgaggtgaagttcgagggcgacaccctggtgaaccgcatcgagctgaagggcatcgacttcaaggaggacggcaacatcctggggcacaagctggagtacaactacaacagccacaacgtctatatcatggccgacaagcagaagaacggcatcaaggtgaacttcaagatccgccacaacatcgaggacggcagcgtgcagctcgccgaccactaccagcagaacacccccatcggcgacggccccgtgctgctgcccgacaaccactacctgagcacccagtccgccctgagcaaagaccccaacgagaagcgcgatcacatggtcctgctggagttcgtgaccgccgccgggatcactctcggcatggacgagctgtacaagtgagcggccgcgtcgagtctagagggcccgtttaaacccgctgatcagcctcgactgtgccttctagttgccagccatctgttgtttgcccctcccccgtgccttccttgaccctggaaggtgccactcccactgtcctttcctaataaaatgaggaaattgcatcgcattgtctgagtaggtgtcattctattctggggggtggggtggggcaggacagcaagggggaggattgggaagacaatagcaggcatgctggggatgcggtgggctctatggcagaaatttatgaagcatttgaaaacatctaccctattctaaagggattcaggaagacgacgtaatggctctcatgtacccttgcctcccccacccccttctttttttttttttaaacaaatcagtttgttttggtacctttaaatggtggtgttgtgagaagatggatgttgagttgcagggtgtggcaccaggtgatgcccttctgtaagtgcccaccgcgggatgccgggaaggggcattatttgtgcactgagaacaccgcgcagcgtgactgtgagttgctcataccgtgctgctatctgggcagcgctgcccatttatttatatgtagattttaaacactgctgttgacaagttggtttgagggagaaaactttaagtgttaaagccacctctataattgattggactttttaattttaatgtttttccccatgaaccacagtttttatatttctaccagaaaagtaaaaatcttttttaaaagtgttgttttt

SEQ ID NO: 48 - DNA, 2369 bp, synthetic construct
  source 1..2369: mol_type = other DNA
gaagactgtggatggcccctccgggaaactgtggcgtgatggccgcggggctctccagaacatcatccctgcctctactggcgctgccaaggctgtgggcaaggtcatccctgagctgaacgggaagctcactggcatggccttccgtgtccccactgccaacgtgtcagtggtggacctgacctgccgtctagaaaaacctgccaaatatgatgacatcaagaaggtggtgaagcaggcgtcggagggccccctcaagggcatcctgggctacactgagcaccaggtggtctcctctgacttcaacagcgacacccactcctccacctttgacgctggggctggcattgccctcaacgaccactttgtcaagctcatttcctggtatgtggctggggccagagactggctcttaaaaagtgcagggtctggcgccctctggtggctggctcagaaaaagggccctgacaactctttacatcttctaggtatgacaacgagttcggatatagcaatagagtggtcgatctgatggctcatatggctagcaaagagggaagcggagctactaacttcagcctgctgaagcaggctggagacgtggaggagaaccctggacctatgtggcccctggtagcggcgctgttgctgggctcggcgtgctgcggatcagctcagctactatttaataaaacaaaatctgtagaattcacgttttgtaatgacactgtcgtcattccatgctttgttactaatatggaggcacaaaacactactgaagtatacgtaaagtggaaatttaaaggaagagatatttacacctttgatggagctctaaacaagtccactgtccccactgactttagtagtgcaaaaattgaagtctcacaattactaaaaggagatgcctctttgaagatggataagagtgatgctgtctcacacacaggaaactacacttgtgaagtaacagaattaaccagagaaggtgaaacgatcatcgagctaaaatatcgtgttgtttcatggttttctccaaatgaaaatattcttattgttattttcccaatttttgctatactcctgttctggggacagtttggtattaaaacacttaaatatagatccggtggtatggatgagaaaacaattgctttacttgttgctggactagtgatcactgtcattgtcattgttggagccattcttttcgtcccaggtgaatattcattaaagaatgctactggccttggtttaattgtgacttctacagggatattaatattacttcactactatgtgtttagtacagcgattggattaacctccttcgtcattgccatattggttattcaggtgatagcctatatcctcgctgtggttggactgagtctctgtattgcggcgtgtataccaatgcatggccctcttctgatttcaggtttgagtatcttagctctagcacaattacttggactagtttatatgaaatttgtggcttccaatcagaagactatacaacctcctaggaaagctgtagaggaaccccttaatgcattcaaagaatcaaaaggaatgatgaatgatgaatgagcggccgcgtcgagtctagagggcccgtttaaacccgctgatcagcctcgactgtgccttctagttgccagccatctgttgtttgcccctcccccgtgccttccttgaccctggaaggtgccactcccactgtcctttcctaataaaatgaggaaattgcatcgcattgtctgagtaggtgtcattctattctggggggtggggtggggcaggacagcaagggggaggattgggaagacaatagcaggcatgctggggatgcggtgggctctatggatttggctacagcaacagggtggtggacctcatggcccacatggcctccaaggagtaagacccctggaccaccagccccagcaagagcacaagaggaagagagagaccctcactgctggggagtccctgccacactcagtcccccaccacactgaatctcccctcctcacagttgccatgtagaccccttgaagaggggaggggcctagggagccgcaccttgtcatgtaccatcaataaagtaccctgtgctcaaccagttacttgtcctgtcttattctagggtctggggcagaggggagggaagctgggcttgtgtcaaggtgagacattcttgctggggagggacctggtatgttctcctcagactgagggtagggcctccaaacagccttgcttgcttcgagaaccatttgcttcccgctcagacgtcttgagtgctacaggaagctggcaccactacttcagagaacaaggccttttcctctcctcgctccagt

SEQ ID NO: 49 - DNA, 2142 bp, synthetic construct
  source 1..2142: mol_type = other DNA
ctgaccacagctctgcaagcagacttccatttacagtgaggaggtgagcattgcattgaacaaaagatggcgttttcacttggaattagttatctgaagctttaggattcctcagcaatatgattatgagacaagaaaggaagattcagaaatgagtctagttgaaggcagcaattcagagaagaagattcagttgttatcattgccgtcctgcttggtttatggcctggttcaggaccaaggagagaagtgtgaatacatgcctcttgagctatagaatgagacgctggagtcactaagatgattttttaaaagtattgttttataaacaaaaataagattgtgacaagggattccactattaatgttttcatgcctgtgccttaatctgactgggtatggtgagaattgtgcttgcagctttaaggtaagaattttaccatcttaatatgttaagaagtgccatttcagtctctcatctctactccaacttgtcttcttaggggctaaagtgcgggccgagatctacgaggccttcgagaatatctaccccatcctgaagggcttcagaaagaccaccggaagcggagctactaacttcagcctgctgaagcaggctggagacgtggaggagaaccctggacctatggtgagcaagggcgaggagctgttcaccggggtggtgcccatcctggtcgagctggacggcgacgtaaacggccacaagttcagcgtgtccggcgagggcgagggcgatgccacctacggcaagctgaccctgaagttcatctgcaccaccggcaagctgcccgtgccctggcccaccctcgtgaccaccctgacctacggcgtgcagtgcttcagccgctaccccgaccacatgaagcagcacgacttcttcaagtccgccatgcccgaaggctacgtccaggagcgcaccatcttcttcaaggacgacggcaactacaagacccgcgccgaggtgaagttcgagggcgacaccctggtgaaccgcatcgagctgaagggcatcgacttcaaggaggacggcaacatcctggggcacaagctggagtacaactacaacagccacaacgtctatatcatggccgacaagcagaagaacggcatcaaggtgaacttcaagatccgccacaacatcgaggacggcagcgtgcagctcgccgaccactaccagcagaacacccccatcggcgacggccccgtgctgctgcccgacaaccactacctgagcacccagtccgccctgagcaaagaccccaacgagaagcgcgatcacatggtcctgctggagttcgtgaccgccgccgggatcactctcggcatggacgagctgtacaagtgagcggccgcgtcgagtctagagggcccgtttaaacccgctgatcagcctcgactgtgccttctagttgccagccatctgttgtttgcccctcccccgtgccttccttgaccctggaaggtgccactcccactgtcctttcctaataaaatgaggaaattgcatcgcattgtctgagtaggtgtcattctattctggggggtggggtggggcaggacagcaagggggaggattgggaagacaatagcaggcatgctggggatgcggtgggctctatggtaggtgctaaagtcagagcagaaatttatgaagcatttgaaaacatctaccctattctaaagggattcaggaagacgacgtaatggctctcatgtacccttgcctcccccacccccttctttttttttttttaaacaaatcagtttgttttggtacctttaaatggtggtgttgtgagaagatggatgttgagttgcagggtgtggcaccaggtgatgcccttctgtaagtgcccaccgcgggatgccgggaaggggcattatttgtgcactgagaacaccgcgcagcgtgactgtgagttgctcataccgtgctgctatctgggcagcgctgcccatttatttatatgtagattttaaacactgctgttgacaagttggtttgagggagaaaactttaagtgttaaagccacctctataattgattggactttttaattttaatgtttttccccatgaaccacagtttttatatttctaccagaaaagtaaaaatcttt

SEQ ID NO: 50 - DNA, 2083 bp, synthetic construct
  source 1..2083: mol_type = other DNA
acaaaagatggcgttttcacttggaattagttatctgaagctttaggattcctcagcaatatgattatgagacaagaaaggaagattcagaaatgagtctagttgaaggcagcaattcagagaagaagattcagttgttatcattgccgtcctgcttggtttatggcctggttcaggaccaaggagagaagtgtgaatacatgcctcttgagctatagaatgagacgctggagtcactaagatgattttttaaaagtattgttttataaacaaaaataagattgtgacaagggattccactattaatgttttcatgcctgtgccttaatctgactgggtatggtgagaattgtgcttgcagctttaaggtaagaattttaccatcttaatatgttaagaagtgccatttcagtctctcatctctactccaacttgtcttcttaggtgctaaagtcagagcagaaatttatgaagcattcgagaacatctaccctattctaaagggattcaggaagacgacgggaagcggagctactaacttcagcctgctgaagcaggctggagacgtggaggagaaccctggacctatggtgagcaagggcgaggagctgttcaccggggtggtgcccatcctggtcgagctggacggcgacgtaaacggccacaagttcagcgtgtccggcgagggcgagggcgatgccacctacggcaagctgaccctgaagttcatctgcaccaccggcaagctgcccgtgccctggcccaccctcgtgaccaccctgacctacggcgtgcagtgcttcagccgctaccccgaccacatgaagcagcacgacttcttcaagtccgccatgcccgaaggctacgtccaggagcgcaccatcttcttcaaggacgacggcaactacaagacccgcgccgaggtgaagttcgagggcgacaccctggtgaaccgcatcgagctgaagggcatcgacttcaaggaggacggcaacatcctggggcacaagctggagtacaactacaacagccacaacgtctatatcatggccgacaagcagaagaacggcatcaaggtgaacttcaagatccgccacaacatcgaggacggcagcgtgcagctcgccgaccactaccagcagaacacccccatcggcgacggccccgtgctgctgcccgacaaccactacctgagcacccagtccgccctgagcaaagaccccaacgagaagcgcgatcacatggtcctgctggagttcgtgaccgccgccgggatcactctcggcatggacgagctgtacaagtgagcggccgcgtcgagtctagagggcccgtttaaacccgctgatcagcctcgactgtgccttctagttgccagccatctgttgtttgcccctcccccgtgccttccttgaccctggaaggtgccactcccactgtcctttcctaataaaatgaggaaattgcatcgcattgtctgagtaggtgtcattctattctggggggtggggtggggcaggacagcaagggggaggattgggaagacaatagcaggcatgctggggatgcggtgggctctatggaagggattcaggaagacgacgtaatggctctcatgtacccttgcctcccccacccccttctttttttttttttaaacaaatcagtttgttttggtacctttaaatggtggtgttgtgagaagatggatgttgagttgcagggtgtggcaccaggtgatgcccttctgtaagtgcccaccgcgggatgccgggaaggggcattatttgtgcactgagaacaccgcgcagcgtgactgtgagttgctcataccgtgctgctatctgggcagcgctgcccatttatttatatgtagattttaaacactgctgttgacaagttggtttgagggagaaaactttaagtgttaaagccacctctataattgattggactttttaattttaatgtttttccccatgaaccacagtttttatatttctaccagaaaagtaaaaatcttttttaaaagtgttgtttttctaatttataactcctaggggttatttctgtgccagacaca

SEQ ID NO: 51 - DNA, 2084 bp, synthetic construct
  source 1..2084: mol_type = other DNA
ggcccgggggactccacatggtggcaggcagtggcatcagcaagacactctctccctcacagaacgtgaagctccctgacgcctatgagcgcctcatcctggacgtcttctgcgggagccagatgcacttcgtgcgcaggtgaggcccagctgccggcccctgcatacctgtgggctatggggtggcctttgccctccctccctgtgtgccaccggcctcccaagccataccatgtcccctcagcgacgagctccgtgaggcctggcgtattttcaccccactgctgcaccagattgagctggagaagcccaagcccatcccctatatttatggcaggtgaggaaagggtgggggctggggacagagcccagcgggcaggggcggggtgagggtggagctacctcatgcctctcctccacccgtcactctccagccgaggccccacggaggcagacgagctgatgaagagagtgggcttccagtacgagggaacctacaaatgggtcaaccctcacaagctgggaagcggagctactaacttcagcctgctgaagcaggctggagacgtggaggagaaccctggacctatggtgagcaagggcgaggagctgttcaccggggtggtgcccatcctggtcgagctggacggcgacgtaaacggccacaagttcagcgtgtccggcgagggcgagggcgatgccacctacggcaagctgaccctgaagttcatctgcaccaccggcaagctgcccgtgccctggcccaccctcgtgaccaccctgacctacggcgtgcagtgcttcagccgctaccccgaccacatgaagcagcacgacttcttcaagtccgccatgcccgaaggctacgtccaggagcgcaccatcttcttcaaggacgacggcaactacaagacccgcgccgaggtgaagttcgagggcgacaccctggtgaaccgcatcgagctgaagggcatcgacttcaaggaggacggcaacatcctggggcacaagctggagtacaactacaacagccacaacgtctatatcatggccgacaagcagaagaacggcatcaaggtgaacttcaagatccgccacaacatcgaggacggcagcgtgcagctcgccgaccactaccagcagaacacccccatcggcgacggccccgtgctgctgcccgacaaccactacctgagcacccagtccgccctgagcaaagaccccaacgagaagcgcgatcacatggtcctgctggagttcgtgaccgccgccgggatcactctcggcatggacgagctgtacaagtgagcggccgcgtcgagtctagagggcccgtttaaacccgctgatcagcctcgactgtgccttctagttgccagccatctgttgtttgcccctcccccgtgccttccttgaccctggaaggtgccactcccactgtcctttcctaataaaatgaggaaattgcatcgcattgtctgagtaggtgtcattctattctggggggtggggtggggcaggacagcaagggggaggattgggaagacaatagcaggcatgctggggatgcggtgggctctatgggtgggtgaacccccacaagctctgagccctgggcacccacctccacccccgccacggccaccctccttcccgccgcccgaccccgagtcgggaggactccgggaccattgacctcagctgcacattcctggccccgggctctggccaccctggcccgcccctcgctgctgctactacccgagcccagctacattcctcagctgccaagcactcgagaccatcctggcccctccagaccctgcctgagcccaggagctgagtcacctcctccactcactccagcccaacagaaggaaggaggagggcgcccattcgtctgtcccagagcttattggccactgggtctcactcctgagtggggccagggtgggagggagggacgagggggaggaaaggggcgagcacccacgtgagagaatctgcctgtggccttgcccgccagcctcagtgccacttgacattccttgtcaccagcaacatctcgagccccctggatgtcc

SEQ ID NO: 52 - DNA, 2149 bp, synthetic construct
  source 1..2149: mol_type = other DNA
ccagggggctgtagtggggccaggctggacctctgtgccctgagcatggctttcttgtttttcagttttggaactccccaaagagctgtcagaaatctttgatcccacacgaggtaggctgctgcattcctccctgaggctaggggtaagggacacagctcattgggtcctatggctgttttcttgcccttttgaggaccttgttgtggcgcttatggtaactggggcaaagggtgaagttcctgatgggcaggtggggttccctttcctgggctttggtgggtggagaggtgggagctggaatgttagtaactgagctccctccattcccagagtgcatgagctcggagctgctggaggagttgatgtcctcagaaggtgggtggccctggaaggtgggagtgggtgtgggcaggggttgggctgctgctaggggagccctggcccagggcctgagactagtgctctctgcagtgttcgcccctctgctgagactttctcctcctcctggcgaccacgactacatctacaacctggacgagagcgagggcgtgtgcgacctgtttgatgtgcccgtgctgaacctgggaagcggagctactaacttcagcctgctgaagcaggctggagacgtggaggagaaccctggacctatggtgagcaagggcgaggagctgttcaccggggtggtgcccatcctggtcgagctggacggcgacgtaaacggccacaagttcagcgtgtccggcgagggcgagggcgatgccacctacggcaagctgaccctgaagttcatctgcaccaccggcaagctgcccgtgccctggcccaccctcgtgaccaccctgacctacggcgtgcagtgcttcagccgctaccccgaccacatgaagcagcacgacttcttcaagtccgccatgcccgaaggctacgtccaggagcgcaccatcttcttcaaggacgacggcaactacaagacccgcgccgaggtgaagttcgagggcgacaccctggtgaaccgcatcgagctgaagggcatcgacttcaaggaggacggcaacatcctggggcacaagctggagtacaactacaacagccacaacgtctatatcatggccgacaagcagaagaacggcatcaaggtgaacttcaagatccgccacaacatcgaggacggcagcgtgcagctcgccgaccactaccagcagaacacccccatcggcgacggccccgtgctgctgcccgacaaccactacctgagcacccagtccgccctgagcaaagaccccaacgagaagcgcgatcacatggtcctgctggagttcgtgaccgccgccgggatcactctcggcatggacgagctgtacaagtgagcggccgcgtcgagtctagagggcccgtttaaacccgctgatcagcctcgactgtgccttctagttgccagccatctgttgtttgcccctcccccgtgccttccttgaccctggaaggtgccactcccactgtcctttcctaataaaatgaggaaattgcatcgcattgtctgagtaggtgtcattctattctggggggtggggtggggcaggacagcaagggggaggattgggaagacaatagcaggcatgctggggatgcggtgggctctatggccacccccgggagaccacgattatatctacaacctggacgagagtgaaggtgtctgtgacctctttgatgtgcctgttctcaacctctgactgacagggacatgccctgtgtggctgggacccagactgtctgacctgggggttgcctggggacctctcccacccgacccctacagagcttgagagccacagacgcctggcttctccggcctcccctcaccgcacagttctggccacagctcccgctcctgtgctggcacttctgtgctcgcagagcaggggaacaggactcagcccccatcaccgtggagccaaagtgtttgcttctccctttctgcggccttcgccagcccaggctcggctgccacccagtggcacagaaccgaggagctgccattaccccccatagggggcagtgtcttgttcctgccagcctcagtgtcttgcttctgccagctccttcccctaggagggaagggtggggtggaactgggcacatg

SEQ ID NO: 53 - DNA, 2130 bp, synthetic construct
  source 1..2130: mol_type = other DNA
ccaggctggacctctgtgccctgagcatggctttcttgtttttcagttttggaactccccaaagagctgtcagaaatctttgatcccacacgaggtaggctgctgcattcctccctgaggctaggggtaagggacacagctcattgggtcctatggctgttttcttgcccttttgaggaccttgttgtggcgcttatggtaactggggcaaagggtgaagttcctgatgggcaggtggggttccctttcctgggctttggtgggtggagaggtgggagctggaatgttagtaactgagctccctccattcccagagtgcatgagctcggagctgctggaggagttgatgtcctcagaaggtgggtggccctggaaggtgggagtgggtgtgggcaggggttgggctgctgctaggggagccctggcccagggcctgagactagtgctctctgcagtgtttgcccctctgcttcgtcttagtcctcctccgggcgaccacgactacatctacaacctggacgagagcgagggcgtgtgcgacctgtttgatgtgcccgtgctgaacctgggaagcggagctactaacttcagcctgctgaagcaggctggagacgtggaggagaaccctggacctatggtgagcaagggcgaggagctgttcaccggggtggtgcccatcctggtcgagctggacggcgacgtaaacggccacaagttcagcgtgtccggcgagggcgagggcgatgccacctacggcaagctgaccctgaagttcatctgcaccaccggcaagctgcccgtgccctggcccaccctcgtgaccaccctgacctacggcgtgcagtgcttcagccgctaccccgaccacatgaagcagcacgacttcttcaagtccgccatgcccgaaggctacgtccaggagcgcaccatcttcttcaaggacgacggcaactacaagacccgcgccgaggtgaagttcgagggcgacaccctggtgaaccgcatcgagctgaagggcatcgacttcaaggaggacggcaacatcctggggcacaagctggagtacaactacaacagccacaacgtctatatcatggccgacaagcagaagaacggcatcaaggtgaacttcaagatccgccacaacatcgaggacggcagcgtgcagctcgccgaccactaccagcagaacacccccatcggcgacggccccgtgctgctgcccgacaaccactacctgagcacccagtccgccctgagcaaagaccccaacgagaagcgcgatcacatggtcctgctggagttcgtgaccgccgccgggatcactctcggcatggacgagctgtacaagtgagcggccgcgtcgagtctagagggcccgtttaaacccgctgatcagcctcgactgtgccttctagttgccagccatctgttgtttgcccctcccccgtgccttccttgaccctggaaggtgccactcccactgtcctttcctaataaaatgaggaaattgcatcgcattgtctgagtaggtgtcattctattctggggggtggggtggggcaggacagcaagggggaggattgggaagacaatagcaggcatgctggggatgcggtgggctctatggattatatctacaacctggacgagagtgaaggtgtctgtgacctctttgatgtgcctgttctcaacctctgactgacagggacatgccctgtgtggctgggacccagactgtctgacctgggggttgcctggggacctctcccacccgacccctacagagcttgagagccacagacgcctggcttctccggcctcccctcaccgcacagttctggccacagctcccgctcctgtgctggcacttctgtgctcgcagagcaggggaacaggactcagcccccatcaccgtggagccaaagtgtttgcttctccctttctgcggccttcgccagcccaggctcggctgccacccagtggcacagaaccgaggagctgccattaccccccatagggggcagtgtcttgttcctgccagcctcagtgtcttgcttctgccagctccttcccctaggagggaagggtggggtggaactgggcacatgccagcaccacttctagctt

SEQ ID NO: 54 - DNA, 2062 bp, synthetic construct
  source 1..2062: mol_type = other DNA
gtcagaaatctttgatcccacacgaggtaggctgctgcattcctccctgaggctaggggtaagggacacagctcattgggtcctatggctgttttcttgcccttttgaggaccttgttgtggcgcttatggtaactggggcaaagggtgaagttcctgatgggcaggtggggttccctttcctgggctttggtgggtggagaggtgggagctggaatgttagtaactgagctccctccattcccagagtgcatgagctcggagctgctggaggagttgatgtcctcagaaggtgggtggccctggaaggtgggagtgggtgtgggcaggggttgggctgctgctaggggagccctggcccagggcctgagactagtgctctctgcagtgtttgcccctctgcttcgtctttctccacccccgggagaccacgattatatctacaacctggacgagagtgaaggtgtctgtgacctcttcgacgtgcccgtgctcaacctcggaagcggagctactaacttcagcctgctgaagcaggctggagacgtggaggagaaccctggacctatggtgagcaagggcgaggagctgttcaccggggtggtgcccatcctggtcgagctggacggcgacgtaaacggccacaagttcagcgtgtccggcgagggcgagggcgatgccacctacggcaagctgaccctgaagttcatctgcaccaccggcaagctgcccgtgccctggcccaccctcgtgaccaccctgacctacggcgtgcagtgcttcagccgctaccccgaccacatgaagcagcacgacttcttcaagtccgccatgcccgaaggctacgtccaggagcgcaccatcttcttcaaggacgacggcaactacaagacccgcgccgaggtgaagttcgagggcgacaccctggtgaaccgcatcgagctgaagggcatcgacttcaaggaggacggcaacatcctggggcacaagctggagtacaactacaacagccacaacgtctatatcatggccgacaagcagaagaacggcatcaaggtgaacttcaagatccgccacaacatcgaggacggcagcgtgcagctcgccgaccactaccagcagaacacccccatcggcgacggccccgtgctgctgcccgacaaccactacctgagcacccagtccgccctgagcaaagaccccaacgagaagcgcgatcacatggtcctgctggagttcgtgaccgccgccgggatcactctcggcatggacgagctgtacaagtgagcggccgcgtcgagtctagagggcccgtttaaacccgctgatcagcctcgactgtgccttctagttgccagccatctgttgtttgcccctcccccgtgccttccttgaccctggaaggtgccactcccactgtcctttcctaataaaatgaggaaattgcatcgcattgtctgagtaggtgtcattctattctggggggtggggtggggcaggacagcaagggggaggattgggaagacaatagcaggcatgctggggatgcggtgggctctatggtgactgacagggacatgccctgtgtggctgggacccagactgtctgacctgggggttgcctggggacctctcccacccgacccctacagagcttgagagccacagacgcctggcttctccggcctcccctcaccgcacagttctggccacagctcccgctcctgtgctggcacttctgtgctcgcagagcaggggaacaggactcagcccccatcaccgtggagccaaagtgtttgcttctccctttctgcggccttcgccagcccaggctcggctgccacccagtggcacagaaccgaggagctgccattaccccccatagggggcagtgtcttgttcctgccagcctcagtgtcttgcttctgccagctccttcccctaggagggaagggtggggtggaactgggcacatgccagcaccacttctagcttccttcgctatcccccaccccctgaccctccagctcctcctggccctctcacgtgcccacttctgctgg

SEQ ID NO: 55 - DNA, 2188 bp, synthetic construct
  source 1..2188: mol_type = other DNA
agagcagggtttcttgacagcagtgctattggcattttaaactggataattctttgttgtgatgggctttcctgtggactgtactatgttggtacacaagaaaaacagtgtactatgtgaatactcactcaaagccagtagcactccctgattgtaacaccaaaaaagtctctcagcattgccaaatgtcccctgtggcagcagaatcactccctgatgagaaccactaccctggagtaaaatctataactatgtcttagaaaataacacagaaaattaatatttctttcactctactccttccattagtgatcaaataaagaaggcatttggcgctacttgccaaattgttggctcaaacttgtgctgaaccttttttggttttctacacttaagtttttttgcctataacccagagaactttgaaaatagagtgtagttaatgtgtatctaatgttactttgtattgacttaatttaccggcctttaatccacagcataagaagtcccacggcaaggacaaagagaaccggggcatcaacacactggaacggtccaaggtcgaggaaacaaccgagcacctggtcaccaagagcagactgcctctgagagcccagatcaacctgggaagcggagctactaacttcagcctgctgaagcaggctggagacgtggaggagaaccctggacctatggtgagcaagggcgaggagctgttcaccggggtggtgcccatcctggtcgagctggacggcgacgtaaacggccacaagttcagcgtgtccggcgagggcgagggcgatgccacctacggcaagctgaccctgaagttcatctgcaccaccggcaagctgcccgtgccctggcccaccctcgtgaccaccctgacctacggcgtgcagtgcttcagccgctaccccgaccacatgaagcagcacgacttcttcaagtccgccatgcccgaaggctacgtccaggagcgcaccatcttcttcaaggacgacggcaactacaagacccgcgccgaggtgaagttcgagggcgacaccctggtgaaccgcatcgagctgaagggcatcgacttcaaggaggacggcaacatcctggggcacaagctggagtacaactacaacagccacaacgtctatatcatggccgacaagcagaagaacggcatcaaggtgaacttcaagatccgccacaacatcgaggacggcagcgtgcagctcgccgaccactaccagcagaacacccccatcggcgacggccccgtgctgctgcccgacaaccactacctgagcacccagtccgccctgagcaaagaccccaacgagaagcgcgatcacatggtcctgctggagttcgtgaccgccgccgggatcactctcggcatggacgagctgtacaagtgagcggccgcgtcgagtctagagggcccgtttaaacccgctgatcagcctcgactgtgccttctagttgccagccatctgttgtttgcccctcccccgtgccttccttgaccctggaaggtgccactcccactgtcctttcctaataaaatgaggaaattgcatcgcattgtctgagtaggtgtcattctattctggggggtggggtggggcaggacagcaagggggaggattgggaagacaatagcaggcatgctggggatgcggtgggctctatggaaaaaatcacatggaaaagacaaagaaaacagaggcattaacacactggagaggtctaaagtggaagaaactacagagcacttggttacaaagagcagattacctctgcgagcccagatcaacctttaattcacttgggggttggcaattttatttttaaagaaaacttaaaaataaaacctgaaaccccagaacttgagccttgtgtatagattttaaaagaatatatatatcagccgggcgcggtggctcatgcctgtaatcccagcactttgggaggctgaggcgggtggattgcttgagcccaggagtttgagaccagcctggccaacgtggcaaaacctcgtctctgttaaaaattagccgggcgtggtggcacactcctgtaatcccagctactggggaggctgaggcacgagaatcacttgaacccaggaagcggggttgcagtgagccaaaggtacaccactacactccagcctgggcaacagagcaagact

SEQ ID NO: 56 - DNA, 2120 bp, synthetic construct
  source 1..2120: mol_type = other DNA
ttcctgtggactgtactatgttggtacacaagaaaaacagtgtactatgtgaatactcactcaaagccagtagcactccctgattgtaacaccaaaaaagtctctcagcattgccaaatgtcccctgtggcagcagaatcactccctgatgagaaccactaccctggagtaaaatctataactatgtcttagaaaataacacagaaaattaatatttctttcactctactccttccattagtgatcaaataaagaaggcatttggcgctacttgccaaattgttggctcaaacttgtgctgaaccttttttggttttctacacttaagtttttttgcctataacccagagaactttgaaaatagagtgtagttaatgtgtatctaatgttactttgtattgacttaattttcccgccttaaatccacagcataaaaaatcacatggaaaagacaaagaaaacagaggcattaacacactggagaggtctaaagtggaagaaacaaccgagcacctggtcaccaagagcagactgcctctgagagcccagatcaacctgggaagcggagctactaacttcagcctgctgaagcaggctggagacgtggaggagaaccctggacctatggtgagcaagggcgaggagctgttcaccggggtggtgcccatcctggtcgagctggacggcgacgtaaacggccacaagttcagcgtgtccggcgagggcgagggcgatgccacctacggcaagctgaccctgaagttcatctgcaccaccggcaagctgcccgtgccctggcccaccctcgtgaccaccctgacctacggcgtgcagtgcttcagccgctaccccgaccacatgaagcagcacgacttcttcaagtccgccatgcccgaaggctacgtccaggagcgcaccatcttcttcaaggacgacggcaactacaagacccgcgccgaggtgaagttcgagggcgacaccctggtgaaccgcatcgagctgaagggcatcgacttcaaggaggacggcaacatcctggggcacaagctggagtacaactacaacagccacaacgtctatatcatggccgacaagcagaagaacggcatcaaggtgaacttcaagatccgccacaacatcgaggacggcagcgtgcagctcgccgaccactaccagcagaacacccccatcggcgacggccccgtgctgctgcccgacaaccactacctgagcacccagtccgccctgagcaaagaccccaacgagaagcgcgatcacatggtcctgctggagttcgtgaccgccgccgggatcactctcggcatggacgagctgtacaagtgagcggccgcgtcgagtctagagggcccgtttaaacccgctgatcagcctcgactgtgccttctagttgccagccatctgttgtttgcccctcccccgtgccttccttgaccctggaaggtgccactcccactgtcctttcctaataaaatgaggaaattgcatcgcattgtctgagtaggtgtcattctattctggggggtggggtggggcaggacagcaagggggaggattgggaagacaatagcaggcatgctggggatgcggtgggctctatggaactacagagcacttggctacatagagcagattacctctgcgagcccagatcaacctttaattcacttgggggttggcaattttatttttaaagaaaacttaaaaataaaacctgaaaccccagaacttgagccttgtgtatagattttaaaagaatatatatatcagccgggcgcggtggctcatgcctgtaatcccagcactttgggaggctgaggcgggtggattgcttgagcccaggagtttgagaccagcctggccaacgtggcaaaacctcgtctctgttaaaaattagccgggcgtggtggcacactcctgtaatcccagctactggggaggctgaggcacgagaatcacttgaacccaggaagcggggttgcagtgagccaaaggtacaccactacactccagcctgggcaacagagcaagactcggtctcaaaaacaaaatttaaaaaagatataaggcagtactgtaaattcagttgaattttgatatct

SEQ ID NO: 57 - DNA, 2152 bp, synthetic construct
  source 1..2152: mol_type = other DNA
ttaaactggataattctttgttgtgatgggctttcctgtggactgtactatgttggtacacaagaaaaacagtgtactatgtgaatactcactcaaagccagtagcactccctgattgtaacaccaaaaaagtctctcagcattgccaaatgtcccctgtggcagcagaatcactccctgatgagaaccactaccctggagtaaaatctataactatgtcttagaaaataacacagaaaattaatatttctttcactctactccttccattagtgatcaaataaagaaggcatttggcgctacttgccaaattgttggctcaaacttgtgctgaaccttttttggttttctacacttaagtttttttgcctataacccagagaactttgaaaatagagtgtagttaatgtgtatctaatgttactttgtattgacttaattttcccgccttaaatccacagcataaaaaatcacatggaaaagacaaagaaaacagaggcatcaacacactggaacggtccaaggtcgaggaaacaaccgagcacctggtcaccaagagcagactgcctctgagagcccagatcaacctgggaagcggagctactaacttcagcctgctgaagcaggctggagacgtggaggagaaccctggacctatggtgagcaagggcgaggagctgttcaccggggtggtgcccatcctggtcgagctggacggcgacgtaaacggccacaagttcagcgtgtccggcgagggcgagggcgatgccacctacggcaagctgaccctgaagttcatctgcaccaccggcaagctgcccgtgccctggcccaccctcgtgaccaccctgacctacggcgtgcagtgcttcagccgctaccccgaccacatgaagcagcacgacttcttcaagtccgccatgcccgaaggctacgtccaggagcgcaccatcttcttcaaggacgacggcaactacaagacccgcgccgaggtgaagttcgagggcgacaccctggtgaaccgcatcgagctgaagggcatcgacttcaaggaggacggcaacatcctggggcacaagctggagtacaactacaacagccacaacgtctatatcatggccgacaagcagaagaacggcatcaaggtgaacttcaagatccgccacaacatcgaggacggcagcgtgcagctcgccgaccactaccagcagaacacccccatcggcgacggccccgtgctgctgcccgacaaccactacctgagcacccagtccgccctgagcaaagaccccaacgagaagcgcgatcacatggtcctgctggagttcgtgaccgccgccgggatcactctcggcatggacgagctgtacaagtgagcggccgcgtcgagtctagagggcccgtttaaacccgctgatcagcctcgactgtgccttctagttgccagccatctgttgtttgcccctcccccgtgccttccttgaccctggaaggtgccactcccactgtcctttcctaataaaatgaggaaattgcatcgcattgtctgagtaggtgtcattctattctggggggtggggtggggcaggacagcaagggggaggattgggaagacaatagcaggcatgctggggatgcggtgggctctatggattaacacactggagagttctgaagtggaagaaactacagagcacttggttacaaagagcagattacctctgcgagcccagatcaacctttaattcacttgggggttggcaattttatttttaaagaaaacttaaaaataaaacctgaaaccccagaacttgagccttgtgtatagattttaaaagaatatatatatcagccgggcgcggtggctcatgcctgtaatcccagcactttgggaggctgaggcgggtggattgcttgagcccaggagtttgagaccagcctggccaacgtggcaaaacctcgtctctgttaaaaattagccgggcgtggtggcacactcctgtaatcccagctactggggaggctgaggcacgagaatcacttgaacccaggaagcggggttgcagtgagccaaaggtacaccactacactccagcctgggcaacagagcaagactcggtctcaaaaacaaaatttaaaaaagatataaggc

SEQ ID NO: 58 - protein, 1334 aa, synthetic construct
MGHHHHHHGSTQFEGFTNLYQVSKTLRFELIPQGKTLKHIQEQGFIEEDKARNDHYKELKPIIDRIYKTYADQCLQLVQLDWENLSAAIDSYRKEKTEETRNALIEEQATYRNAIHDYFIGRTDNLTDAINKRHAEIYKGLFKAELFNGKVLKQLGTVTTTEHENALLRSFDKFTTYFSGFYENRKNVFSAEDISTAIPHRIVQDNFPKFKENCHIFTRLITAVPSLREHFENVKKAIGIFVSTSIEEVFSFPFYNQLLTQTQIDLYNQLLGGISREAGTEKIKGLNEVLNLAIQKNDETAHIIASLPHRFIPLFKQILSDRNTLSFILEEFKSDEEVIQSFCKYKTLLRNENVLETAEALFNELNSIDLTHIFISHKKLETISSALCDHWDTLRNALYERRISELTGKITKSAKEKVQRSLKHEDINLQEIISAAGKELSEAFKQKTSEILSHAHAALDQPLPTTLKKQEEKEILKSQLDSLLGLYHLLDWFAVDESNEVDPEFSARLTGIKLEMEPSLSFYNKARNYATKKPYSVEKFKLNFQMPTLASGWDVNKEKNNGAILFVKNGLYYLGIMPKQKGRYKALSFEPTEKTSEGFDKMYYDYFPDAAKMIPKCSTQLKAVTAHFQTHTTPILLSNNFIEPLEITKEIYDLNNPEKEPKKFQTAYAKKTGDQKGYREALCKWIDFTRDFLSKYTKTTSIDLSSLRPSSQYKDLGEYYAELNPLLYHISFQRIAEKEIMDAVETGKLYLFQIYNKDFAKGHHGKPNLHTLYWTGLFSPENLAKTSIKLNGQAELFYRPKSRMKRMAARLGEKMLNKKLKDQKTPIPDTLYQELYDYVNHRLSHDLSDEARALLPNVITKEVSHEIIKDRRFTSDKFFFHVPITLNYQAANSPSKFNQRVNAYLKEHPETPIIGIDRGERNLIYITVIDSTGKILEQRSLNTIQQFDYQKKLDNREKERVAARQAWSVVGTIKDLKQGYLSQVIHEIVDLMIHYQAVVVLENLNFGFKSKRTGIAEKAVYQQFEKMLIDKLNCLVLKDYPAEKVGGVLNPYQLTDQFTSFAKMGTQSGFLFYVPAPYTSKIDPLTGFVDPFVWKTIKNHESRKHFLEGFDFLHYDVKTGDFILHFKMNRNLSFQRGLPGFMPAWDIVFEKNETQFDAKGTPFIAGKRIVPVIENHRFTGRYRDLYPANELIALLEEKGIVFRDGSNILPKLLENDDSHAIDTMVALIRSVLQMRNSNAATGEDYINSPVRDLNGVCFDSRFQNPEWPMDADANGAYHIALKGQLLLNHLKESKDLKLQNGISNQDWLAYIQELRNGSPKKKRKVGSPKKKRKV

SEQ ID NO: 59 - protein, 1363 aa, synthetic construct
MTQFEGFTNLYQVSKTLRFELIPQGKTLKHIQEQGFIEEDKARNDHYKELKPIIDRIYKTYADQCLQLVQLDWENLSAAIDSYRKEKTEETRNALIEEQATYRNAIHDYFIGRTDNLTDAINKRHAEIYKGLFKAELFNGKVLKQLGTVTTTEHENALLRSFDKFTTYFSGFYENRKNVFSAEDISTAIPHRIVQDNFPKFKENCHIFTRLITAVPSLREHFENVKKAIGIFVSTSIEEVFSFPFYNQLLTQTQIDLYNQLLGGISREAGTEKIKGLNEVLNLAIQKNDETAHIIASLPHRFIPLFKQILSDRNTLSFILEEFKSDEEVIQSFCKYKTLLRNENVLETAEALFNELNSIDLTHIFISHKKLETISSALCDHWDTLRNALYERRISELTGKITKSAKEKVQRSLKHEDINLQEIISAAGKELSEAFKQKTSEILSHAHAALDQPLPTTLKKQEEKEILKSQLDSLLGLYHLLDWFAVDESNEVDPEFSARLTGIKLEMEPSLSFYNKARNYATKKPYSVEKFKLNFQRPTLASGWDVNKEKNNGAILFVKNGLYYLGIMPKQKGRYKALSFEPTEKTSEGFDKMYYDYFPDAAKMIPKCSTQLKAVTAHFQTHTTPILLSNNFIEPLEITKEIYDLNNPEKEPKKFQTAYAKKTGDQKGYREALCKWIDFTRDFLSKYTKTTSIDLSSLRPSSQYKDLGEYYAELNPLLYHISFQRIAEKEIMDAVETGKLYLFQIYNKDFAKGHHGKPNLHTLYWTGLFSPENLAKTSIKLNGQAELFYRPKSRMKRMAHRLGEKMLNKKLKDQKTPIPDTLYQELYDYVNHRLSHDLSDEARALLPNVITKEVSHEIIKDRRFTSDKFLFHVPITLNYQAANSPSKFNQRVNAYLKEHPETPIIGIDRGERNLIYITVIDSTGKILEQRSLNTIQQFDYQKKLDNREKERVAARQAWSVVGTIKDLKQGYLSQVIHEIVDLMIHYQAVVVLENLNFGFKSKRTGIAEKAVYQQFEKMLIDKLNCLVLKDYPAEKVGGVLNPYQLTDQFTSFAKMGTQSGFLFYVPAPYTSKIDPLTGFVDPFVWKTIKNHESRKHFLEGFDFLHYDVKTGDFILHFKMNRNLSFQRGLPGFMPAWDIVFEKNETQFDAKGTPFIAGKRIVPVIENHRFTGRYRDLYPANELIALLEEKGIVFRDGSNILPKLLENDDSHAIDTMVALIRSVLQMRNSNAATGEDYINSPVRDLNGVCFDSRFQNPEWPMDADANGAYHIALKGQLLLNHLKESKDLKLQNGISNQDWLAYIQELRNGRSSDDEATADSQHAAPPKKKRKVGGSGGSGGSGGSGGSGGSGGSGGSLEHHHHHH

SEQ ID NO: 60 - protein, 1363 aa, synthetic construct
MTQFEGFTNLYQVSKTLRFELIPQGKTLKHIQEQGFIEEDKARNDHYKELKPIIDRIYKTYADQCLQLVQLDWENLSAAIDSYRKEKTEETRNALIEEQATYRNAIHDYFIGRTDNLTDAINKRHAEIYKGLFKAELFNGKVLKQLGTVTTTEHENALLRSFDKFTTYFSGFYENRKNVFSAEDISTAIPHRIVQDNFPKFKENCHIFTRLITAVPSLREHFENVKKAIGIFVSTSIEEVFSFPFYNQLLTQTQIDLYNQLLGGISREAGTEKIKGLNEVLNLAIQKNDETAHIIASLPHRFIPLFKQILSDRNTLSFILEEFKSDEEVIQSFCKYKTLLRNENVLETAEALFNELNSIDLTHIFISHKKLETISSALCDHWDTLRNALYERRISELTGKITKSAKEKVQRSLKHEDINLQEIISAAGKELSEAFKQKTSEILSHAHAALDQPLPTTLKKQEEKEILKSQLDSLLGLYHLLDWFAVDESNEVDPEFSARLTGIKLEMEPSLSFYNKARNYATKKPYSVEKFKLNFQMPTLASGWDVNKEKNNGAILFVKNGLYYLGIMPKQKGRYKALSFEPTEKTSEGFDKMYYDYFPDAAKMIPKCSTQLKAVTAHFQTHTTPILLSNNFIEPLEITKEIYDLNNPEKEPKKFQTAYAKKTGDQKGYREALCKWIDFTRDFLSKYTKTTSIDLSSLRPSSQYKDLGEYYAELNPLLYHISFQRIAEKEIMDAVETGKLYLFQIYNKDFAKGHHGKPNLHTLYWTGLFSPENLAKTSIKLNGQAELFYRPKSRMKRMAHRLGEKMLNKKLKDQKTPIPDTLYQELYDYVNHRLSHDLSDEARALLPNVITKEVSHEIIKDRRFTSDKFFFHVPITLNYQAANSPSKFNQRVNAYLKEHPETPIIGIDRGERNLIYITVIDSTGKILEQRSLNTIQQFDYQKKLDNREKERVAARQAWSVVGTIKDLKQGYLSQVIHEIVDLMIHYQAVVVLENLNFGFKSKRTGIAEKAVYQQFEKMLIDKLNCLVLKDYPAEKVGGVLNPYQLTDQFTSFAKMGTQSGFLFYVPAPYTSKIDPLTGFVDPFVWKTIKNHESRKHFLEGFDFLHYDVKTGDFILHFKMNRNLSFQRGLPGFMPAWDIVFEKNETQFDAKGTPFIAGKRIVPVIENHRFTGRYRDLYPANELIALLEEKGIVFRDGSNILPKLLENDDSHAIDTMVALIRSVLQMRNSNAATGEDYINSPVRDLNGVCFDSRFQNPEWPMDADANGAYHIALKGQLLLNHLKESKDLKLQNGISNQDWLAYIQELRNGRSSDDEATADSQHAAPPKKKRKVGGSGGSGGSGGSGGSGGSGGSGGSLEHHHHHH

SEQ ID NO: 61 - protein, 1363 aa, synthetic construct
MTQFEGFTNLYQVSKTLRFELIPQGKTLKHIQEQGFIEEDKARNDHYKELKPIIDRIYKTYADQCLQLVQLDWENLSAAIDSYRKEKTEETRNALIEEQATYRNAIHDYFIGRTDNLTDAINKRHAEIYKGLFKAELFNGKVLKQLGTVTTTEHENALLRSFDKFTTYFSGFYENRKNVFSAEDISTAIPHRIVQDNFPKFKENCHIFTRLITAVPSLREHFENVKKAIGIFVSTSIEEVFSFPFYNQLLTQTQIDLYNQLLGGISREAGTEKIKGLNEVLNLAIQKNDETAHIIASLPHRFIPLFKQILSDRNTLSFILEEFKSDEEVIQSFCKYKTLLRNENVLETAEALFNELNSIDLTHIFISHKKLETISSALCDHWDTLRNALYERRISELTGKITKSAKEKVQRSLKHEDINLQEIISAAGKELSEAFKQKTSEILSHAHAALDQPLPTTLKKQEEKEILKSQLDSLLGLYHLLDWFAVDESNEVDPEFSARLTGIKLEMEPSLSFYNKARNYATKKPYSVEKFKLNFQRPTLASGWDVNKEKNNGAILFVKNGLYYLGIMPKQKGRYKALSFEPTEKTSEGFDKMYYDYFPDAAKMIPKCSTQLKAVTAHFQTHTTPILLSNNFIEPLEITKEIYDLNNPEKEPKKFQTAYAKKTGDQKGYREALCKWIDFTRDFLSKYTKTTSIDLSSLRPSSQYKDLGEYYAELNPLLYHISFQRIAEKEIMDAVETGKLYLFQIYNKDFAKGHHGKPNLHTLYWTGLFSPENLAKTSIKLNGQAELFYRPKSRMKRMAARLGEKMLNKKLKDQKTPIPDTLYQELYDYVNHRLSHDLSDEARALLPNVITKEVSHEIIKDRRFTSDKFLFHVPITLNYQAANSPSKFNQRVNAYLKEHPETPIIGIDRGERNLIYITVIDSTGKILEQRSLNTIQQFDYQKKLDNREKERVAARQAWSVVGTIKDLKQGYLSQVIHEIVDLMIHYQAVVVLENLNFGFKSKRTGIAEKAVYQQFEKMLIDKLNCLVLKDYPAEKVGGVLNPYQLTDQFTSFAKMGTQSGFLFYVPAPYTSKIDPLTGFVDPFVWKTIKNHESRKHFLEGFDFLHYDVKTGDFILHFKMNRNLSFQRGLPGFMPAWDIVFEKNETQFDAKGTPFIAGKRIVPVIENHRFTGRYRDLYPANELIALLEEKGIVFRDGSNILPKLLENDDSHAIDTMVALIRSVLQMRNSNAATGEDYINSPVRDLNGVCFDSRFQNPEWPMDADANGAYHIALKGQLLLNHLKESKDLKLQNGISNQDWLAYIQELRNGRSSDDEATADSQHAAPPKKKRKVGGSGGSGGSGGSGGSGGSGGSGGSLEHHHHHH

SEQ ID NO: 62 - protein, 1331 aa, synthetic construct
MTQFEGFTNLYQVSKTLRFELIPQGKTLKHIQEQGFIEEDKARNDHYKELKPIIDRIYKTYADQCLQLVQLDWENLSAAIDSYRKEKTEETRNALIEEQATYRNAIHDYFIGRTDNLTDAINKRHAEIYKGLFKAELFNGKVLKQLGTVTTTEHENALLRSFDKFTTYFSGFYENRKNVFSAEDISTAIPHRIVQDNFPKFKENCHIFTRLITAVPSLREHFENVKKAIGIFVSTSIEEVFSFPFYNQLLTQTQIDLYNQLLGGISREAGTEKIKGLNEVLNLAIQKNDETAHIIASLPHRFIPLFKQILSDRNTLSFILEEFKSDEEVIQSFCKYKTLLRNENVLETAEALFNELNSIDLTHIFISHKKLETISSALCDHWDTLRNALYERRISELTGKITKSAKEKVQRSLKHEDINLQEIISAAGKELSEAFKQKTSEILSHAHAALDQPLPTTLKKQEEKEILKSQLDSLLGLYHLLDWFAVDESNEVDPEFSARLTGIKLEMEPSLSFYNKARNYATKKPYSVEKFKLNFQRPTLASGWDVNKEKNNGAILFVKNGLYYLGIMPKQKGRYKALSFEPTEKTSEGFDKMYYDYFPDAAKMIPKCSTQLKAVTAHFQTHTTPILLSNNFIEPLEITKEIYDLNNPEKEPKKFQTAYAKKTGDQKGYREALCKWIDFTRDFLSKYTKTTSIDLSSLRPSSQYKDLGEYYAELNPLLYHISFQRIAEKEIMDAVETGKLYLFQIYNKDFAKGHHGKPNLHTLYWTGLFSPENLAKTSIKLNGQAELFYRPKSRMKRMAARLGEKMLNKKLKDQKTPIPDTLYQELYDYVNHRLSHDLSDEARALLPNVITKEVSHEIIKDRRFTSDKFLFHVPITLNYQAANSPSKFNQRVNAYLKEHPETPIIGIDRGERNLIYITVIDSTGKILEQRSLNTIQQFDYQKKLDNREKERVAARQAWSVVGTIKDLKQGYLSQVIHEIVDLMIHYQAVVVLENLNFGFKSKRTGIAEKAVYQQFEKMLIDKLNCLVLKDYPAEKVGGVLNPYQLTDQFTSFAKMGTQSGFLFYVPAPYTSKIDPLTGFVDPFVWKTIKNHESRKHFLEGFDFLHYDVKTGDFILHFKMNRNLSFQRGLPGFMPAWDIVFEKNETQFDAKGTPFIAGKRIVPVIENHRFTGRYRDLYPANELIALLEEKGIVFRDGSNILPKLLENDDSHAIDTMVALIRSVLQMRNSNAATGEDYINSPVRDLNGVCFDSRFQNPEWPMDADANGAYHIALKGQLLLNHLKESKDLKLQNGISNQDWLAYIQELRNGRSSDDEATADSQHAAPPKKKRKV

SEQ ID NO: 63 - protein, 1331 aa, synthetic construct
MTQFEGFTNLYQVSKTLRFELIPQGKTLKHIQEQGFIEEDKARNDHYKELKPIIDRIYKTYADQCLQLVQLDWENLSAAIDSYRKEKTEETRNALIEEQATYRNAIHDYFIGRTDNLTDAINKRHAEIYKGLFKAELFNGKVLKQLGTVTTTEHENALLRSFDKFTTYFSGFYENRKNVFSAEDISTAIPHRIVQDNFPKFKENCHIFTRLITAVPSLREHFENVKKAIGIFVSTSIEEVFSFPFYNQLLTQTQIDLYNQLLGGISREAGTEKIKGLNEVLNLAIQKNDETAHIIASLPHRFIPLFKQILSDRNTLSFILEEFKSDEEVIQSFCKYKTLLRNENVLETAEALFNELNSIDLTHIFISHKKLETISSALCDHWDTLRNALYERRISELTGKITKSAKEKVQRSLKHEDINLQEIISAAGKELSEAFKQKTSEILSHAHAALDQPLPTTLKKQEEKEILKSQLDSLLGLYHLLDWFAVDESNEVDPEFSARLTGIKLEMEPSLSFYNKARNYATKKPYSVEKFKLNFQRPTLASGWDVNKEKNNGAILFVKNGLYYLGIMPKQKGRYKALSFEPTEKTSEGFDKMYYDYFPDAAKMIPKCSTQLKAVTAHFQTHTTPILLSNNFIEPLEITKEIYDLNNPEKEPKKFQTAYAKKTGDQKGYREALCKWIDFTRDFLSKYTKTTSIDLSSLRPSSQYKDLGEYYAELNPLLYHISFQRIAEKEIMDAVETGKLYLFQIYNKDFAKGHHGKPNLHTLYWTGLFSPENLAKTSIKLNGQAELFYRPKSRMKRMAHRLGEKMLNKKLKDQKTPIPDTLYQELYDYVNHRLSHDLSDEARALLPNVITKEVSHEIIKDRRFTSDKFLFHVPITLNYQAANSPSKFNQRVNAYLKEHPETPIIGIDRGERNLIYITVIDSTGKILEQRSLNTIQQFDYQKKLDNREKERVAARQAWSVVGTIKDLKQGYLSQVIHEIVDLMIHYQAVVVLENLNFGFKSKRTGIAEKAVYQQFEKMLIDKLNCLVLKDYPAEKVGGVLNPYQLTDQFTSFAKMGTQSGFLFYVPAPYTSKIDPLTGFVDPFVWKTIKNHESRKHFLEGFDFLHYDVKTGDFILHFKMNRNLSFQRGLPGFMPAWDIVFEKNETQFDAKGTPFIAGKRIVPVIENHRFTGRYRDLYPANELIALLEEKGIVFRDGSNILPKLLENDDSHAIDTMVALIRSVLQMRNSNAATGEDYINSPVRDLNGVCFDSRFQNPEWPMDADANGAYHIALKGQLLLNHLKESKDLKLQNGISNQDWLAYIQELRNGRSSDDEATADSQHAAPPKKKRKV

SEQ ID NO: 64 - protein, 1363 aa, synthetic construct; identical to SEQ ID NO: 59

SEQ ID NO: 65 - protein, 1361 aa, synthetic construct
MGRDPGKPIPNPLLGLDSTAPKKKRKVGIHGVPAATQFEGFTNLYQVSKTLRFELIPQGKTLKHIQEQGFIEEDKARNDHYKELKPIIDRIYKTYADQCLQLVQLDWENLSAAIDSYRKEKTEETRNALIEEQATYRNAIHDYFIGRTDNLTDAINKRHAEIYKGLFKAELFNGKVLKQLGTVTTTEHENALLRSFDKFTTYFSGFYENRKNVFSAEDISTAIPHRIVQDNFPKFKENCHIFTRLITAVPSLREHFENVKKAIGIFVSTSIEEVFSFPFYNQLLTQTQIDLYNQLLGGISREAGTEKIKGLNEVLNLAIQKNDETAHIIASLPHRFIPLFKQILSDRNTLSFILEEFKSDEEVIQSFCKYKTLLRNENVLETAEALFNELNSIDLTHIFISHKKLETISSALCDHWDTLRNALYERRISELTGKITKSAKEKVQRSLKHEDINLQEIISAAGKELSEAFKQKTSEILSHAHAALDQPLPTTLKKQEEKEILKSQLDSLLGLYHLLDWFAVDESNEVDPEFSARLTGIKLEMEPSLSFYNKARNYATKKPYSVEKFKLNFQMPTLASGWDVNKEKNNGAILFVKNGLYYLGIMPKQKGRYKALSFEPTEKTSEGFDKMYYDYFPDAAKMIPKCSTQLKAVTAHFQTHTTPILLSNNFIEPLEITKEIYDLNNPEKEPKKFQTAYAKKTGDQKGYREALCKWIDFTRDFLSKYTKTTSIDLSSLRPSSQYKDLGEYYAELNPLLYHISFQRIAEKEIMDAVETGKLYLFQIYNKDFAKGHHGKPNLHTLYWTGLFSPENLAKTSIKLNGQAELFYRPKSRMKRMAHRLGEKMLNKKLKDQKTPIPDTLYQELYDYVNHRLSHDLSDEARALLPNVITKEVSHEIIKDRRFTSDKFFFHVPITLNYQAANSPSKFNQRVNAYLKEHPETPIIGIDRGERNLIYITVIDSTGKILEQRSLNTIQQFDYQKKLDNREKERVAARQAWSVVGTIKDLKQGYLSQVIHEIVDLMIHYQAVVVLENLNFGFKSKRTGIAEKAVYQQFEKMLIDKLNCLVLKDYPAEKVGGVLNPYQLTDQFTSFAKMGTQSGFLFYVPAPYTSKIDPLTGFVDPFVWKTIKNHESRKHFLEGFDFLHYDVKTGDFILHFKMNRNLSFQRGLPGFMPAWDIVFEKNETQFDAKGTPFIAGKRIVPVIENHRFTGRYRDLYPANELIALLEEKGIVFRDGSNILPKLLENDDSHAIDTMVALIRSVLQMRNSNAATGEDYINSPVRDLNGVCFDSRFQNPEWPMDADANGAYHIALKGQLLLNHLKESKDLKLQNGISNQDWLAYIQELRNPKKKRKVKLAAALEHHHHHH

SEQ ID NO: 66 - protein, 1307 aa, synthetic construct
MTQFEGFTNLYQVSKTLRFELIPQGKTLKHIQEQGFIEEDKARNDHYKELKPIIDRIYKTYADQCLQLVQLDWENLSAAIDSYRKEKTEETRNALIEEQATYRNAIHDYFIGRTDNLTDAINKRHAEIYKGLFKAELFNGKVLKQLGTVTTTEHENALLRSFDKFTTYFSGFYENRKNVFSAEDISTAIPHRIVQDNFPKFKENCHIFTRLITAVPSLREHFENVKKAIGIFVSTSIEEVFSFPFYNQLLTQTQIDLYNQLLGGISREAGTEKIKGLNEVLNLAIQKNDETAHIIASLPHRFIPLFKQILSDRNTLSFILEEFKSDEEVIQSFCKYKTLLRNENVLETAEALFNELNSIDLTHIFISHKKLETISSALCDHWDTLRNALYERRISELTGKITKSAKEKVQRSLKHEDINLQEIISAAGKELSEAFKQKTSEILSHAHAALDQPLPTTLKKQEEKEILKSQLDSLLGLYHLLDWFAVDESNEVDPEFSARLTGIKLEMEPSLSFYNKARNYATKKPYSVEKFKLNFQMPTLASGWDVNKEKNNGAILFVKNGLYYLGIMPKQKGRYKALSFEPTEKTSEGFDKMYYDYFPDAAKMIPKCSTQLKAVTAHFQTHTTPILLSNNFIEPLEITKEIYDLNNPEKEPKKFQTAYAKKTGDQKGYREALCKWIDFTRDFLSKYTKTTSIDLSSLRPSSQYKDLGEYYAELNPLLYHISFQRIAEKEIMDAVETGKLYLFQIYNKDFAKGHHGKPNLHTLYWTGLFSPENLAKTSIKLNGQAELFYRPKSRMKRMAHRLGEKMLNKKLKDQKTPIPDTLYQELYDYVNHRLSHDLSDEARALLPNVITKEVSHEIIKDRRFTSDKFFFHVPITLNYQAANSPSKFNQRVNAYLKEHPETPIIGIDRGERNLIYITVIDSTGKILEQRSLNTIQQFDYQKKLDNREKERVAARQAWSVVGTIKDLKQGYLSQVIHEIVDLMIHYQAVVVLENLNFGFKSKRTGIAEKAVYQQFEKMLIDKLNCLVLKDYPAEKVGGVLNPYQLTDQFTSFAKMGTQSGFLFYVPAPYTSKIDPLTGFVDPFVWKTIKNHESRKHFLEGFDFLHYDVKTGDFILHFKMNRNLSFQRGLPGFMPAWDIVFEKNETQFDAKGTPFIAGKRIVPVIENHRFTGRYRDLYPANELIALLEEKGIVFRDGSNILPKLLENDDSHAIDTMVALIRSVLQMRNSNAATGEDYINSPVRDLNGVCFDSRFQNPEWPMDADANGAYHIALKGQLLLNHLKESKDLKLQNGISNQDWLAYIQELRN

SEQ ID NO: 67 - RNA, 10 nt, synthetic construct
  source 1..10: mol_type = other RNA
aagacctttt

SEQ ID NO: 68 - RNA, 25 nt, synthetic construct
  source 1..25: mol_type = other RNA
atgtgtttttgtcaaaagacctttt

SEQ ID NO: 69 - RNA, 60 nt, synthetic construct
  source 1..60: mol_type = other RNA
aggccagcttgccggttttttagtcgtgctgcttcatgtgtttttgtcaaaagacctttt

SEQ ID NO: 70 - DNA, 10 bp, synthetic construct
  source 1..10: mol_type = other DNA
aagacctttt

SEQ ID NO: 71 - DNA, 25 bp, synthetic construct
  source 1..25: mol_type = other DNA
atgtgtttttgtcaaaagacctttt

SEQ ID NO: 72 - DNA, 60 bp, synthetic construct
  source 1..60: mol_type = other DNA
aggccagcttgccggttttttagtcgtgctgcttcatgtgtttttgtcaaaagacctttt

SEQ ID NO: 73 - DNA, 20 bp, synthetic construct
  source 1..20: mol_type = other DNA
tttttgtcaaaagacctttt

SEQ ID NO: 74 - DNA, 30 bp, synthetic construct
  source 1..30: mol_type = other DNA
gcttcatgtgtttttgtcaaaagacctttt

SEQ ID NO: 75 - DNA, 50 bp, synthetic construct
  source 1..50: mol_type = other DNA
gccggttttttagtcgtgctgcttcatgtgtttttgtcaaaagacctttt

SEQ ID NO: 76 - DNA, 40 bp, synthetic construct
  source 1..40: mol_type = other DNA
tagtcgtgctgcttcatgtgtttttgtcaaaagacctttt

SEQ ID NO: 77 - DNA, 20 bp, synthetic construct
  source 1..20: mol_type = other DNA
  modified_base 1: mod_base = OTHER; note = Nucleotide with phosphorothioate linkage
  modified_base 2: mod_base = OTHER; note = Nucleotide with phosphorothioate linkage
ccgaagttttcttcggtttt

SEQ ID NO: 78 - DNA, 25 bp, synthetic construct
  source 1..25: mol_type = other DNA
  modified_base 1: mod_base = OTHER; note = Nucleotide with phosphorothioate linkage
  modified_base 2: mod_base = OTHER; note = Nucleotide with phosphorothioate linkage
tttttccgaagttttcttcggtttt

SEQ ID NO: 79 - DNA, 30 bp, synthetic construct
  source 1..30: mol_type = other DNA
  modified_base 1: mod_base = OTHER; note = Nucleotide with phosphorothioate linkage
  modified_base 2: mod_base = OTHER; note = Nucleotide with phosphorothioate linkage
aacgctttttccgaagttttcttcggtttt

SEQ ID NO: 80 - DNA, 41 bp, synthetic construct
  source 1..41: mol_type = other DNA
  modified_base 1: mod_base = OTHER; note = Nucleotide with phosphorothioate linkage
  modified_base 2: mod_base = OTHER; note = Nucleotide with phosphorothioate linkage
gcgttgttttcaacgctttttccgaagttttcttcggtttt

SEQ ID NO: 81 - DNA, 62 bp, synthetic construct
  source 1..62: mol_type = other DNA
  modified_base 1: mod_base = OTHER; note = Nucleotide with phosphorothioate linkage
  modified_base 2: mod_base = OTHER; note = Nucleotide with phosphorothioate linkage
ggcttcttttgaagcctttttgcgttgttttcaacgctttttccgaagttttcttcggtttt

SEQ ID NO: 82 - DNA, 25 bp, synthetic construct
  source 1..25: mol_type = other DNA
  modified_base 1: mod_base = OTHER; note = Nucleotide with phosphorothioate linkage
  modified_base 2: mod_base = OTHER; note = Nucleotide with phosphorothioate linkage
atgtgtttttgtcaaaagacctttt

SEQ ID NO: 83 - RNA, 25 nt, synthetic construct
  source 1..25: mol_type = other RNA
aaaaaaaaaaaaaaaaaaaaaaaaa

SEQ ID NO: 84 - DNA, 25 bp, synthetic construct
  source 1..25: mol_type = other DNA
ttttttttttttttttttttttttt

SEQ ID NO: 85 - RNA, 25 nt, synthetic construct
  source 1..25: mol_type = other RNA
  modified_base 1: mod_base = OTHER; note = 2'-O-methyl modified nucleotide with phosphorothioate linkage
  modified_base 2: mod_base = OTHER; note = 2'-O-methyl modified nucleotide with phosphorothioate linkage
atgtgtttttgtcaaaagacctttt

SEQ ID NO: 86 - RNA, 25 nt, synthetic construct
  source 1..25: mol_type = other RNA
  modified_base 1: mod_base = OTHER; note = 2'-O-methyl modified nucleotide with phosphorothioate linkage
  modified_base 2: mod_base = OTHER; note = 2'-O-methyl modified nucleotide with phosphorothioate linkage
aaaaaaaaaaaaaaaaaaaaaaaaa

SEQ ID NO: 87 - RNA, 25 nt, synthetic construct
  source 1..25: mol_type = other RNA
  modified_base 1: mod_base = OTHER; note = 2'-O-methyl modified nucleotide with phosphorothioate linkage
  modified_base 2: mod_base = OTHER; note = 2'-O-methyl modified nucleotide with phosphorothioate linkage
ttttttttttttttttttttttttt

SEQ ID NO: 88 - DNA, 20 bp, synthetic construct
  source 1..20: mol_type = other DNA
tctgcagaaatgttccccgt

SEQ ID NO: 89 - RNA, 20 nt, synthetic construct
  source 1..20: mol_type = other RNA
tctgcagaaatgttccccgt

SEQ ID NO: 90 - RNA, 20 nt, synthetic construct
  source 1..20: mol_type = other RNA
taatttctactcttgtagat

SEQ ID NO: 91 - RNA, 40 nt, synthetic construct
  source 1..40: mol_type = other RNA
taatttctactcttgtagattctgcagaaatgttccccgt

SEQ ID NO: 92 - DNA, 65 bp, synthetic construct
  source 1..65: mol_type = other DNA
  misc_feature 1..25: note = DNA
  misc_feature 26..65: note = RNA
atgtgtttttgtcaaaagacctttttaatttctactcttgtagattctgcagaaatgttccccgt

SEQ ID NO: 93 - RNA, 41 nt, synthetic construct
  source 1..41: mol_type = other RNA
taatttctactcttgtagatatcttctaggtatgacaacga

SEQ ID NO: 94 - RNA, 21 nt, synthetic construct
  source 1..21: mol_type = other RNA
tgagccagccaccagagggcg

SEQ ID NO: 95 - RNA, 21 nt, synthetic construct
  source 1..21: mol_type = other RNA
atcttctaggtatgacaacga

SEQ ID NO: 96 - RNA, 21 nt, synthetic construct
  source 1..21: mol_type = other RNA
gctacagcaacagggtggtgg

SEQ ID NO: 97 - RNA, 21 nt, synthetic construct
  source 1..21: mol_type = other RNA
ccataatttcctttcaaggtg

SEQ ID NO: 98 - RNA, 21 nt, synthetic construct
  source 1..21: mol_type = other RNA
ctttcaaggtggggagggagg

SEQ ID NO: 99 - RNA, 21 nt, synthetic construct
  source 1..21: mol_type = other RNA
aaggtggggagggaggtagag

SEQ ID NO: 100 - RNA, 21 nt, synthetic construct
  source 1..21: mol_type = other RNA
gcagaccacagtccatgccat

SEQ ID NO: 101 - RNA, 21 nt, synthetic construct
  source 1..21: mol_type = other RNA
cagaccacagtccatgccatc

SEQ ID NO: 102 - RNA, 21 nt, synthetic construct
  source 1..21: mol_type = other RNA
ccggaggggccatccacagtc

SEQ ID NO: 103 - RNA, 21 nt, synthetic construct
  source 1..21: mol_type = other RNA
tagacggcaggtcaggtccac

SEQ ID NO: 104 - RNA, 21 nt, synthetic construct
  source 1..21: mol_type = other RNA
ctagacggcaggtcaggtcca

SEQ ID NO: 105 - RNA, 21 nt, synthetic construct
  source 1..21: mol_type = other RNA
tctagacggcaggtcaggtcc

SEQ ID NO: 106 - RNA, 21 nt, synthetic construct
  source 1..21: mol_type = other RNA
gcaggtttttctagacggcag

SEQ ID NO: 107 - RNA, 21 nt, synthetic construct
  source 1..21: mol_type = other RNA
tcaagctcatttcctggtatg

SEQ ID NO: 108 - RNA, 21 nt, synthetic construct
  source 1..21: mol_type = other RNA
ctggtatgtggctggggccag

SEQ ID NO: 109 - RNA, 21 nt, synthetic construct
  source 1..21: mol_type = other RNA
agagccagtctctggccccag

SEQ ID NO: 110 - RNA, 21 nt, synthetic construct
  source 1..21: mol_type = other RNA
aagagccagtctctggcccca

SEQ ID NO: 111 - RNA, 21 nt, synthetic construct
  source 1..21: mol_type = other RNA
taagagccagtctctggcccc

SEQ ID NO: 112 - RNA, 21 nt, synthetic construct
  source 1..21: mol_type = other RNA
ctgagccagccaccagagggc

SEQ ID NO: 113 - RNA, 21 nt, synthetic construct
  source 1..21: mol_type = other RNA
tctgagccagccaccagaggg

SEQ ID NO: 114 - RNA, 21 nt, synthetic construct
  source 1..21: mol_type = other RNA
catcttctaggtatgacaacg

SEQ ID NO: 115 - RNA, 21 nt, synthetic construct
  source 1..21: mol_type = other RNA
ttgatggtacatgacaaggtg

SEQ ID NO: 116 - RNA, 21 nt, synthetic construct
  source 1..21: mol_type = other RNA
gaggccctaccctcagtctga

SEQ ID NO: 117 - RNA, 21 nt, synthetic construct
  source 1..21: mol_type = other RNA
cctctcctcgctccagtccta

SEQ ID NO: 118 - RNA, 21 nt, synthetic construct
  source 1..21: mol_type = other RNA
ctctcctcgctccagtcctag

SEQ ID NO: 119 - RNA, 21 nt, synthetic construct
  source 1..21: mol_type = other RNA
gccaacagcagatagcctagg

SEQ ID NO: 120 - RNA, 21 nt, synthetic construct
  source 1..21: mol_type = other RNA
tgtgccctcgtgtcttatctg

SEQ ID NO: 121 - RNA, 21 nt, synthetic construct
  source 1..21: mol_type = other RNA
cctagatgaatcctgcttgaa

SEQ ID NO: 122 - RNA, 21 nt, synthetic construct
  source 1..21: mol_type = other RNA
ggtacttggtttacctagatg

SEQ ID NO: 123 - RNA, 21 nt, synthetic construct
  source 1..21: mol_type = other RNA
aggtacttggtttacctagat

SEQ ID NO: 124 - RNA, 21 nt, synthetic construct
  source 1..21: mol_type = other RNA
aaacattatatagtccttacc

SEQ ID NO: 125 - RNA, 21 nt, synthetic construct
  source 1..21: mol_type = other RNA
taaacattatatagtccttac

SEQ ID NO: 126 - RNA, 21 nt, synthetic construct
  source 1..21: mol_type = other RNA
ccgatttttaaacattatata

SEQ ID NO: 127 - RNA, 21 nt, synthetic construct
  source 1..21: mol_type = other RNA
accgatttttaaacattatat

SEQ ID NO: 128 - RNA, 21 nt, synthetic construct
  source 1..21: mol_type = other RNA
taccgatttttaaacattata

SEQ ID NO: 129 - RNA, 21 nt, synthetic construct
  source 1..21: mol_type = other RNA
aaaatcggtaaaaatgcccac

SEQ ID NO: 130 - RNA, 21 nt, synthetic construct
  source 1..21: mol_type = other RNA
gaggaagatgaactgagatgt

SEQ ID NO: 131 - RNA, 21 nt, synthetic construct
  source 1..21: mol_type = other RNA
aggaagatgaactgagatgtg

SEQ ID NO: 132 - DNA, 20 bp, synthetic construct
  source 1..20: mol_type = other DNA
gctggtgttatattctgatg

SEQ ID NO: 133 - DNA, 20 bp, synthetic construct
  source 1..20: mol_type = other DNA
ccgacttctgaacgtgcggt

SEQ ID NO: 134 - DNA, 20 bp, synthetic construct
  source 1..20: mol_type = other DNA
tgctggcgatacgcgtccac

SEQ ID NO: 135 - DNA, 20 bp, synthetic construct
  source 1..20: mol_type = other DNA
cccgacttctgaacgtgcgg

SEQ ID NO: 136 - DNA, 20 bp, synthetic construct
  source 1..20: mol_type = other DNA
ccaccgcacgttcagaagtc

SEQ ID NO: 137 - DNA, 20 bp, synthetic construct
  source 1..20: mol_type = other DNA
tcacccgacttctgaacgtg

SEQ ID NO: 138 - DNA, 20 bp, synthetic construct
  source 1..20: mol_type = other DNA
cccaccgcacgttcagaagt

SEQ ID NO: 139 - DNA, 20 bp, synthetic construct
  source 1..20: mol_type = other DNA
cgagcagcggggtctgccat

SEQ ID NO: 140 - DNA, 20 bp, synthetic construct
  source 1..20: mol_type = other DNA
acgagcagcggggtctgcca

SEQ ID NO: 141 - DNA, 20 bp, synthetic construct
  source 1..20: mol_type = other DNA
agcggggtctgccatgggtc

SEQ ID NO: 142 - DNA, 20 bp, synthetic construct
  source 1..20: mol_type = other DNA
cctgagcagcccccgaccca

SEQ ID NO: 143 - DNA, 20 bp, synthetic construct
  source 1..20: mol_type = other DNA
ccatgggtcgggggctgctc

SEQ ID NO: 144 - DNA, 20 bp, synthetic construct
  source 1..20: mol_type = other DNA
aacgtgcggtgggatcgtgc

SEQ ID NO: 145 - DNA, 20 bp, synthetic construct
  source 1..20: mol_type = other DNA
ggacgatgtgcagcggccac

SEQ ID NO: 146 - DNA, 20 bp, synthetic construct
  source 1..20: mol_type = other DNA
gtccacaggacgatgtgcag

SEQ ID NO: 147 - DNA, 20 bp, synthetic construct
  source 1..20: mol_type = other DNA
catgggtcgggggctgctca

SEQ ID NO: 148 - DNA, 20 bp, synthetic construct
  source 1..20: mol_type = other DNA
cagcggggtctgccatgggt

SEQ ID NO: 149 - DNA, 20 bp, synthetic construct
  source 1..20: mol_type = other DNA
atgggtcgggggctgctcag

SEQ ID NO: 150 - DNA, 20 bp, synthetic construct
  source 1..20: mol_type = other DNA
cggggtctgccatgggtcgg

SEQ ID NO: 151 - DNA, 20 bp, synthetic construct
  source 1..20: mol_type = other DNA
aggaagtctgtgtggctgta

SEQ ID NO: 152 - DNA, 20 bp, synthetic construct
  source 1..20: mol_type = other DNA
ctccatctgtgagaagccac

SEQ ID NO: 153 - DNA, 20 bp, synthetic construct
  source 1..20: mol_type = other DNA
atgatagtcactgacaacaa

SEQ ID NO: 154 - DNA, 20 bp, synthetic construct
  source 1..20: mol_type = other DNA
gatgctgcagttgctcatgc

SEQ ID NO: 155 - DNA, 20 bp, synthetic construct
  source 1..20: mol_type = other DNA
acagccacacagacttcctg

SEQ ID NO: 156 - DNA, 20 bp, synthetic construct
  source 1..20: mol_type = other DNA
gaagccacaggaagtctgtg

SEQ ID NO: 157 - DNA, 20 bp, synthetic construct
  source 1..20: mol_type = other DNA
ttcctgtggcttctcacaga

SEQ ID NO: 158 - DNA, 141 bp, synthetic construct
  source 1..141: mol_type = other DNA
cctgcaggcagctgcgcgctcgctcgctcactgaggccgcccgggcaaagcccgggcgtcgggcgacctttggtcgcccggcctcagtgagcgagcgagcgcgcagagagggagtggccaactccatcactaggggttcct

SEQ ID NO: 159 - DNA, 141 bp, synthetic construct
  source 1..141: mol_type = other DNA
aggaacccctagtgatggagttggccactccctctctgcgcgctcgctcgctcactgaggccgggcgaccaaaggtcgcccgacgcccgggctttgcccgggcggcctcagtgagcgagcgagcgcgcagctgcctgcagg

SEQ ID NO: 160 - DNA, 20 bp, synthetic construct
  source 1..20: mol_type = other DNA
gacaacatcatcttctcaga

SEQ ID NO: 161 - protein, 159 aa, synthetic construct
MISLIAALAVDYVIGMENAMPWNLPADLAWFKRNTLNKPVIMGRHTWESIGRPLPGRKNIILSSQPSTDDRVTWVKSVDEAIAACGDVPEIMVIGGGRVIEQFLPKAQKLYLTHIDAEVEGDTHFPDYEPDDWESVFSEFHDADAQNSHSYCFEILERR

SEQ ID NO: 162 - DNA, 483 bp, synthetic construct
  source 1..483: mol_type = other DNA
ggtaccatcagtctgattgcggcgttagcggtagattacgttatcggcatggaaaacgccatgccgtggaacctgcctgccgatctcgcctggtttaaacgcaacaccttaaataaacccgtgattatgggccgccatacctgggaatcaatcggtcgtccgttgccaggacgcaaaaatattatcctcagcagtcaaccgagtacggacgatcgcgtaacgtgggtgaagtcggtggatgaagccatcgcggcgtgtggtgacgtaccagaaatcatggtgattggcggcggtcgcgttattgaacagttcttgccaaaagcgcaaaaactgtatctgacgcatatcgacgcagaagtggaaggcgacacccatttcccggattacgagccggatgactgggaatcggtattcagcgaattccacgatgctgatgcgcagaactctcacagctattgctttgagattctggagcggcgataa

SEQ ID NO: 163 - DNA, 474 bp, synthetic construct
  source 1..474: mol_type = other DNA
atcagtctgattgcggcgttagcggtagattacgttatcggcatggaaaacgccatgccgtggaacctgcctgccgatctcgcctggtttaaacgcaacaccttaaataaacccgtgattatgggccgccatacctgggaatcaatcggtcgtccgttgccaggacgcaaaaatattatcctcagcagtcaaccgagtacggacgatcgcgtaacgtgggtgaagtcggtggatgaagccatcgcggcgtgtggtgacgtaccagaaatcatggtgattggcggcggtcgcgttattgaacagttcttgccaaaagcgcaaaaactgtatctgacgcatatcgacgcagaagtggaaggcgacacccatttcccggattacgagccggatgactgggaatcggtattcagcgaattccacgatgctgatgcgcagaactctcacagctattgctttgagattctggagcggcga

SEQ ID NO: 164 - protein, 112 aa, synthetic construct
MGVEKQVIRPGNGPKPAPGQTVTVHCTGFGKDGDLSQKFWSTKDEGQKPFSFQIGKGAVIKGWDEGVIGMQIGEVARLRCSSDYAYGAGGFPAWGIQPNSVLDFEIEVLSVQ

SEQ ID NO: 165 - DNA, 765 bp, synthetic construct
  source 1..765: mol_type = other DNA
atgtggcaactgctgctgcctacagctctgctgcttctggtgtctgccggcatgagaaccgaggatctgcctaaggccgtggtgttcctggaacctcagtggtacagagtgctggaaaaggacagcgtgaccctgaagtgccagggcgcctattctcccgaggacaatagcacccagtggttccacaacgagagcctgatcagcagccaggccagcagctactttatcgatgccgccaccgtggacgacagcggcgagtacagatgccagaccaatctgagcaccctgagcgaccctgtgcagctggaagtgcacattggatggttgctgctgcaagcccctagatgggtgttcaaagaagaggaccccatccacctgagatgccactcttggaagaacacagccctgcacaaagtgacctacctgcagaacggcaagggcagaaagtacttccaccacaacagcgacttctacatccccaaggccacactgaaggactccggctcctacttctgcagaggcctggtcggcagcaagaacgtgtccagcgagacagtgaacatcaccatcacacagggcctcgccgtgtctaccatcagcagctttttcccacctggctatcaggtgtccttctgcctggtcatggtgctgctgttcgccgtggataccggcctgtacttcagcgtcaagaccaacatccggtccagcaccagagactggaaggaccacaagttcaagtggcggaaggaccctcaggacaagtaa

SEQ ID NO: 166 - DNA, 762 bp, synthetic construct
  source 1..762: mol_type = other DNA
atgtggcagctgttgctgccgacagccctcctgttgctggtctccgctggcatgagaaccgaggatctgcctaaggccgtggtgttcctggaacctcagtggtacagagtgctggaaaaggacagcgtgaccctgaagtgccagggcgcctattctcccgaggacaatagcacccagtggttccacaacgagagcctgatcagcagccaggccagcagctactttatcgatgccgccaccgtggacgacagcggcgagtacagatgccagaccaatctgagcaccctgagcgaccctgtgcagctggaagtgcacattggatggttgctgctgcaagcccctagatgggtgttcaaagaagaggaccccatccacctgagatgccactcttggaagaacacagccctgcacaaagtgacctacctgcagaacggcaagggcagaaagtacttccaccacaacagcgacttctacatccccaaggccacactgaaggactccggctcctacttctgcagaggcctggtcggcagcaagaacgtgtccagcgagacagtgaacatcaccatcacacagggcctcgccgtgtctaccatcagcagctttttcccacctggctatcaggtgtccttctgcctggtcatggtgctgctgttcgccgtggataccggcctgtacttcagcgtcaagaccaacatccggtccagcaccagagactggaaggaccacaagttcaagtggcggaaggaccctcaggacaag

SEQ ID NO: 167 - DNA, 972 bp, synthetic construct
  source 1..972: mol_type = other DNA
atgtggcccctggtagcggcgctgttgctgggctcggcgtgctgcggatcagctcagctactatttaataaaacaaaatctgtagaattcacgttttgtaatgacactgtcgtcattccatgctttgttactaatatggaggcacaaaacactactgaagtatacgtaaagtggaaatttaaaggaagagatatttacacctttgatggagctctaaacaagtccactgtccccactgactttagtagtgcaaaaattgaagtctcacaattactaaaaggagatgcctctttgaagatggataagagtgatgctgtctcacacacaggaaactacacttgtgaagtaacagaattaaccagagaaggtgaaacgatcatcgagctaaaatatcgtgttgtttcatggttttctccaaatgaaaatattcttattgttattttcccaatttttgctatactcctgttctggggacagtttggtattaaaacacttaaatatagatccggtggtatggatgagaaaacaattgctttacttgttgctggactagtgatcactgtcattgtcattgttggagccattcttttcgtcccaggtgaatattcattaaagaatgctactggccttggtttaattgtgacttctacagggatattaatattacttcactactatgtgtttagtacagcgattggattaacctccttcgtcattgccatattggttattcaggtgatagcctatatcctcgctgtggttggactgagtctctgtattgcggcgtgtataccaatgcatggccctcttctgatttcaggtttgagtatcttagctctagcacaattacttggactagtttatatgaaatttgtggcttccaatcagaagactatacaacctcctaggaaagctgtagaggaaccccttaatgcattcaaagaatcaaaaggaatgatgaatgatgaatga

SEQ ID NO: 168 - DNA, 342 bp, synthetic construct
  source 1..342: mol_type = other DNA
aattgggtcaacgtgatcagcgacctgaagaagatcgaggacctgatccagagcatgcacatcgacgccacactgtacaccgagtccgatgtgcaccctagctgcaaagtgaccgccatgaagtgctttctgctggaactgcaagtgatcagcctggaaagcggcgacgccagcatccacgataccgtggaaaacctgatcatcctggccaacaacagcctgagcagcaacggcaatgtgaccgagagcggctgcaaagagtgcgaggaactggaagagaagaacatcaaagagttcctccagagcttcgtccacatcgtgcagatgttcatcaacaccagc

SEQ ID NO: 169 - DNA, 396 bp, synthetic construct
  source 1..396: mol_type = other DNA
atggattggacctggatcctgtttctggtggccgctgccacaagagtgcacagcaattgggtcaacgtgatcagcgacctgaagaagatcgaggacctgatccagagcatgcacatcgacgccacactgtacaccgagtccgatgtgcaccctagctgcaaagtgaccgccatgaagtgctttctgctggaactgcaagtgatcagcctggaaagcggcgacgccagcatccacgataccgtggaaaacctgatcatcctggccaacaacagcctgagcagcaacggcaatgtgaccgagagcggctgcaaagagtgcgaggaactggaagagaagaacatcaaagagttcctccagagcttcgtccacatcgtgcagatgttcatcaacaccagc

SEQ ID NO: 170 - DNA, 453 bp, synthetic construct
  source 1..453: mol_type = other DNA
atggactggacctggattctgttcctggtcgcggctgcaacgcgagtccatagcggtatccatgtttttattcttgggtgtttttctgctgggctgcctaagaccgaggccaactgggtaaatgtcatcagtgacctcaagaaaatagaagaccttatacaaagcatgcacattgatgctactctctacactgagtcagatgtacatccctcatgcaaagtgacggccatgaaatgtttcctcctcgaacttcaagtcatatctctggaaagtggcgacgcgtccatccacgacacggtcgaaaacctgataatactcgctaataatagtctctcttcaaatggtaacgtaaccgagtcaggttgcaaagagtgcgaagagttggaagaaaaaaacataaaggagttcctgcaaagtttcgtgcacattgtgcagatgttcattaatacctct

SEQ ID NO: 171 - DNA, 711 bp, synthetic construct
  source 1..711: mol_type = other DNA
atcacctgtcctccacctatgagcgtggaacacgccgacatctgggtcaagagctacagcctgtacagcagagagcggtacatctgcaacagcggcttcaagagaaaggccggcacaagcagcctgaccgagtgtgtgctgaacaaggccacaaacgtggcccactggaccacacctagcctgaagtgcatcagagatcccgctctggttcatcagaggcctgcccctccatctacagtgacaacagctggcgtgacccctcagcctgagtctctgtctccatctggaaaagagcctgccgccagctctcccagctctaacaatactgctgccaccacagccgctatcgtgcctggatctcagctgatgcctagcaagagccctagcaccggcacaacagagatcagctctcacgagagcagccacggaacaccttctcagaccaccgccaagaattgggagctgacagcctctgcctctcatcagccacctggcgtgtacccacagggccactctgatacaacagtggccatcagcaccagcaccgttctgctgtgtggcctgtctgctgttagcctgctggcctgctacctgaagtctagacagacacctcctctggccagcgtggaaatggaagccatggaagctctgcctgtcacatggggcaccagcagcagagatgaggacctcgagaattgcagccaccacctg

SEQ ID NO: 172 - DNA, 1185 bp, synthetic construct
  source 1..1185: mol_type = other DNA
atggattggacctggatcctgtttctggtggccgctgccacaagagtgcacagcaattgggtcaacgtgatcagcgacctgaagaagatcgaggacctgatccagagcatgcacatcgacgccacactgtacaccgagtccgatgtgcaccctagctgcaaagtgaccgccatgaagtgctttctgctggaactgcaagtgatcagcctggaaagcggcgacgccagcatccacgataccgtggaaaacctgatcatcctggccaacaacagcctgagcagcaacggcaatgtgaccgagagcggctgcaaagagtgcgaggaactggaagagaagaacatcaaagagttcctccagagcttcgtccacatcgtgcagatgttcatcaacaccagctctggcggaggaagcggaggcggaggatctggtggtggtggatctggcggcggtggtagtggcggaggttctctgcaaatcacctgtcctccacctatgagcgtggaacacgccgacatctgggtcaagagctacagcctgtacagcagagagcggtacatctgcaacagcggcttcaagagaaaggccggcacaagcagcctgaccgagtgtgtgctgaacaaggccacaaacgtggcccactggaccacacctagcctgaagtgcatcagagatcccgctctggttcatcagaggcctgcccctccatctacagtgacaacagctggcgtgacccctcagcctgagtctctgtctccatctggaaaagagcctgccgccagctctcccagctctaacaatactgctgccaccacagccgctatcgtgcctggatctcagctgatgcctagcaagagccctagcaccggcacaacagagatcagctctcacgagagcagccacggaacaccttctcagaccaccgccaagaattgggagctgacagcctctgcctctcatcagccacctggcgtgtacccacagggccactctgatacaacagtggccatcagcaccagcaccgttctgctgtgtggcctgtctgctgttagcctgctggcctgctacctgaagtctagacagacacctcctctggccagcgtggaaatggaagccatggaagctctgcctgtcacatggggcaccagcagcagagatgaggacctcgagaattgcagccaccacctg

SEQ ID NO: 173 - DNA, 1242 bp, synthetic construct
  source 1..1242: mol_type = other DNA
atggactggacctggattctgttcctggtcgcggctgcaacgcgagtccatagcggtatccatgtttttattcttgggtgtttttctgctgggctgcctaagaccgaggccaactgggtaaatgtcatcagtgacctcaagaaaatagaagaccttatacaaagcatgcacattgatgctactctctacactgagtcagatgtacatccctcatgcaaagtgacggccatgaaatgtttcctcctcgaacttcaagtcatatctctggaaagtggcgacgcgtccatccacgacacggtcgaaaacctgataatactcgctaataatagtctctcttcaaatggtaacgtaaccgagtcaggttgcaaagagtgcgaagagttggaagaaaaaaacataaaggagttcctgcaaagtttcgtgcacattgtgcagatgttcattaatacctctagcggcggaggatcaggtggcggtggaagcggaggtggaggctccggtggaggaggtagtggcggaggttctcttcaaataacttgtcctccaccgatgtccgtagaacatgcggatatttgggtaaaatcctatagcttgtacagccgagagcggtatatctgcaacagcggcttcaagcggaaggccggcacaagcagcctgaccgagtgcgtgctgaacaaggccaccaacgtggcccactggaccacccctagcctgaagtgcatcagagatcccgccctggtgcatcagcggcctgcccctccaagcacagtgacaacagctggcgtgaccccccagcctgagagcctgagcccttctggaaaagagcctgccgccagcagccccagcagcaacaatactgccgccaccacagccgccatcgtgcctggatctcagctgatgcccagcaagagccctagcaccggcaccaccgagatcagcagccacgagtctagccacggcaccccatctcagaccaccgccaagaactgggagctgacagccagcgcctctcaccagcctccaggcgtgtaccctcagggccacagcgataccacagtggccatcagcacctccaccgtgctgctgtgtggactgagcgccgtgtcactgctggcctgctacctgaagtccagacagacccctccactggccagcgtggaaatggaagccatggaagcactgcccgtgacctggggcaccagctccagagatgaggatctggaaaactgctcccaccacctg

SEQ ID NO: 174 - DNA, 2013 bp, synthetic construct
  source 1..2013: mol_type = other DNA
atgtggcagctgttgctgccgacagccctcctgttgctggtctccgctggcatgagaaccgaggatctgcctaaggccgtggtgttcctggaacctcagtggtacagagtgctggaaaaggacagcgtgaccctgaagtgccagggcgcctattctcccgaggacaatagcacccagtggttccacaacgagagcctgatcagcagccaggccagcagctactttatcgatgccgccaccgtggacgacagcggcgagtacagatgccagaccaatctgagcaccctgagcgaccctgtgcagctggaagtgcacattggatggttgctgctgcaagcccctagatgggtgttcaaagaagaggaccccatccacctgagatgccactcttggaagaacacagccctgcacaaagtgacctacctgcagaacggcaagggcagaaagtacttccaccacaacagcgacttctacatccccaaggccacactgaaggactccggctcctacttctgcagaggcctggtcggcagcaagaacgtgtccagcgagacagtgaacatcaccatcacacagggcctcgccgtgtctaccatcagcagctttttcccacctggctatcaggtgtccttctgcctggtcatggtgctgctgttcgccgtggataccggcctgtacttcagcgtcaagaccaacatccggtccagcaccagagactggaaggaccacaagttcaagtggcggaaggaccctcaggacaagggaagcggagccacaaacttctctctgctgaagcaggcaggagatgttgaagaaaaccctggacctatggattggacctggatcctgtttctggtggccgctgccacaagagtgcacagcaattgggtcaacgtgatcagcgacctgaagaagatcgaggacctgatccagagcatgcacatcgacgccacactgtacaccgagtccgatgtgcaccctagctgcaaagtgaccgccatgaagtgctttctgctggaactgcaagtgatcagcctggaaagcggcgacgccagcatccacgataccgtggaaaacctgatcatcctggccaacaacagcctgagcagcaacggcaatgtgaccgagagcggctgcaaagagtgcgaggaactggaagagaagaacatcaaagagttcctccagagcttcgtccacatcgtgcagatgttcatcaacaccagctctggcggaggaagcggaggcggaggatctggtggtggtggatctggcggcggtggtagtggcggaggttctctgcaaatcacctgtcctccacctatgagcgtggaacacgccgacatctgggtcaagagctacagcctgtacagcagagagcggtacatctgcaacagcggcttcaagagaaaggccggcacaagcagcctgaccgagtgtgtgctgaacaaggccacaaacgtggcccactggaccacacctagcctgaagtgcatcagagatcccgctctggttcatcagaggcctgcccctccatctacagtgacaacagctggcgtgacccctcagcctgagtctctgtctccatctggaaaagagcctgccgccagctctcccagctctaacaatactgctgccaccacagccgctatcgtgcctggatctcagctgatgcctagcaagagccctagcaccggcacaacagagatcagctctcacgagagcagccacggaacaccttctcagaccaccgccaagaattgggagctgacagcctctgcctctcatcagccacctggcgtgtacccacagggccactctgatacaacagtggccatcagcaccagcaccgttctgctgtgtggcctgtctgctgttagcctgctggcctgctacctgaagtctagacagacacctcctctggccagcgtggaaatggaagccatggaagctctgcctgtcacatggggcaccagcagcagagatgaggacctcgagaattgcagccaccacctg

SEQ ID NO: 175 - DNA, 1470 bp, synthetic construct
  source 1..1470: mol_type = other DNA
atgcttctcctggtgacaagccttctgctctgtgagttaccacacccagcattcctcctgatcccagacatccagatgacacagactacatcctccctgtctgcctctctgggagacagagtcaccatcagttgcagggcaagtcaggacattagtaaatatttaaattggtatcagcagaaaccagatggaactgttaaactcctgatctaccatacatcaagattacactcaggagtcccatcaaggttcagtggcagtgggtctggaacagattattctctcaccattagcaacctggagcaagaagatattgccacttacttttgccaacagggtaatacgcttccgtacacgttcggaggggggactaagttggaaataacaggctccacctctggatccggcaagcccggatctggcgagggatccaccaagggcgaggtgaaactgcaggagtcaggacctggcctggtggcgccctcacagagcctgtccgtcacatgcactgtctcaggggtctcattacccgactatggtgtaagctggattcgccagcctccacgaaagggtctggagtggctgggagtaatatggggtagtgaaaccacatactataattcagctctcaaatccagactgaccatcatcaaggacaactccaagagccaagttttcttaaaaatgaacagtctgcaaactgatgacacagccatttactactgtgccaaacattattactacggtggtagctatgctatggactactggggtcaaggaacctcagtcaccgtctcctcagcggccgcaattgaagttatgtatcctcctccttacctagacaatgagaagagcaatggaaccattatccatgtgaaagggaaacacctttgtccaagtcccctatttcccggaccttctaagcccttttgggtgctggtggtggttgggggagtcctggcttgctatagcttgctagtaacagtggcctttattattttctgggtgaggagtaagaggagcaggctcctgcacagtgactacatgaacatgactccccgccgccccgggcccacccgcaagcattaccagccctatgccccaccacgcgacttcgcagcctatcgctccagagtgaagttcagcaggagcgcagacgcccccgcgtaccagcagggccagaaccagctctataacgagctcaatctaggacgaagagaggagtacgatgttttggacaagagacgtggccgggaccctgagatggggggaaagccgagaaggaagaaccctcaggaaggcctgtacaatgaactgcagaaagataagatggcggaggcctacagtgagattgggatgaaaggcgagcgccggaggggcaaggggcacgatggcctttaccagggtctcagtacagccaccaaggacacctacgacgcccttcacatgcaggccctgccccctcgctaa

SEQ ID NO: 176 - DNA, 1485 bp, synthetic construct
  source 1..1485: mol_type = other DNA
atggcactccccgtcaccgcccttctcttgcccctcgccctgctgctgcatgctgccaggcccatggacgaagtgcagctcgtggagtccggtggaggactcgtccaaccgggcggatcccttcgcttgtcctgcgccgcatcaggcttcagcttcaccaactatggcgtccactgggtcagacaggcccccggaaagggactggaatgggtgtccgtgatctggagcggcgggaacaccgactacaacacctccgtgaagggccggttcactattagccgcgacaactccaagaacactctgtacctccaaatgaactccctgagggccgaagatactgctgtgtactattgcgcgagagccctgacctactacgactacgagttcgcgtactggggccaggggactctcgtgaccgtgtccagcggtggtggaggttccggaggcggaggttctggtggcgggggatcagaaatcgtgctgactcagtcccctgcgaccttgtccctgagccctggagaacgggccaccctgagctgtagagccagccagagcatcgggacaaatattcactggtaccagcagaaacccggacaagcaccacggctgctgatctactacgcctccgagtcgatttccggaatcccggctcgcttttcggggtctggatcgggaacggacttcactctgaccatctcgtcgctggaacccgaggatttcgccgtgtactactgccaacagaacaacaattggccgaccacgttcggccagggcaccaagctcgagattaagggatcactggaagcggccgcaaccacaacacctgctccaaggccccccacacccgctccaactatagccagccaaccattgagcctcagacctgaagcttgcaggcccgcagcaggaggcgccgtccatacgcgaggcctggacttcgcgtgtgatatttatatttgggcccctttggccggaacatgtggggtgttgcttctctcccttgtgatcactctgtattgtaagcgcgggagaaagaagctcctgtacatcttcaagcagccttttatgcgacctgtgcaaaccactcaggaagaagatgggtgttcatgccgcttccccgaggaggaagaaggagggtgtgaactgagggtgaaattttctagaagcgccgatgctcccgcatatcagcagggtcagaatcagctctacaatgaattgaatctcggcaggcgagaagagtacgatgttctggacaagagacggggcagggatcccgagatggggggaaagccccggagaaaaaatcctcaggaggggttgtacaatgagctgcagaaggacaagatggctgaagcctatagcgagatcggaatgaaaggcgaaagacgcagaggcaaggggcatgacggtctgtaccagggtctctctacagccaccaaggacacttatgatgcgttgcatatgcaagccttgccaccccgctaa

SEQ ID NO: 177 - DNA, 720 bp, synthetic construct
  source 1..720: mol_type = other DNA
atggtgagcaagggcgaggagctgttcaccggggtggtgcccatcctggtcgagctggacggcgacgtaaacggccacaagttcagcgtgtccggcgagggcgagggcgatgccacctacggcaagctgaccctgaagttcatctgcaccaccggcaagctgcccgtgccctggcccaccctcgtgaccaccctgacctacggcgtgcagtgcttcagccgctaccccgaccacatgaagcagcacgacttcttcaagtccgccatgcccgaaggctacgtccaggagcgcaccatcttcttcaaggacgacggcaactacaagacccgcgccgaggtgaagttcgagggcgacaccctggtgaaccgcatcgagctgaagggcatcgacttcaaggaggacggcaacatcctggggcacaagctggagtacaactacaacagccacaacgtctatatcatggccgacaagcagaagaacggcatcaaggtgaacttcaagatccgccacaacatcgaggacggcagcgtgcagctcgccgaccactaccagcagaacacccccatcggcgacggccccgtgctgctgcccgacaaccactacctgagcacccagtccgccctgagcaaagaccccaacgagaagcgcgatcacatggtcctgctggagttcgtgaccgccgccgggatcactctcggcatggacgagctgtacaagtga

SEQ ID NO: 178 - DNA, 1053 bp, synthetic construct
  source 1..1053: mol_type = other DNA
atgtcaaatattacagatccacagatgtgggattttgatgatctaaatttcactggcatgccacctgcagatgaagattacagcccctgtatgctagaaactgagacactcaacaagtatgttgtgatcatcgcctatgccctagtgttcctgctgagcctgctgggaaactccctggtgatgctggtcatcttatacagcagggtcggccgctccgtcactgatgtctacctgctgaacctggccttggccgacctactctttgccctgaccttgcccatctgggccgcctccaaggtgaatggctggatttttggcacattcctgtgcaaggtggtctcactcctgaaggaagtcaacttctacagtggcatcctgctgttggcctgcatcagtgtggaccgttacctggccattgtccatgccacacgcacactgacccagaagcgtcacttggtcaagtttgtttgtcttggctgctggggactgtctatgaatctgtccctgcccttcttccttttccgccaggcttaccatccaaacaattccagtccagtttgctatgaggtcctgggaaatgacacagcaaaatggcggatggtgttgcggatcctgcctcacacctttggcttcatcgtgccgctgtttgtcatgctgttctgctatggattcaccctgcgtacactgtttaaggcccacatggggcagaagcaccgagccatgagggtcatctttgctgtcgtcctcatcttcctgctttgctggctgccctacaacctggtcctgctggcagacaccctcatgaggacccaggtgatccaggagagctgtgagcgccgcaacaacatcggccgggccctggatgccactgagattctgggatttctccatagctgcctcaaccccatcatctacgccttcatcggccaaaattttcgccatggattcctcaagatcctggctatgcatggcctggtcagcaaggagttcttggcacgtcatcgtgttacctcctacacttcttcgtctgtcaatgtctcttccaacctctga

SEQ ID NO: 179 - DNA, 1248 bp, synthetic construct
  source 1..1248: mol_type = other DNA
atggagttgaggaagtacggccctggaagactggcggggacagttataggaggagctgctcagagtaaatcacagactaaatcagactcaatcacaaaagagttcctgccaggcctttacacagccccttcctccccgttcccgccctcacaggtgagtgaccaccaagtgctaaatgacgccgaggttgccgccctcctggagaacttcagctcttcctatgactatggagaaaacgagagtgactcgtgctgtacctccccgccctgcccacaggacttcagcctgaacttcgaccgggccttcctgccagccctctacagcctcctctttctgctggggctgctgggcaacggcgcggtggcagccgtgctgctgagccggcggacagccctgagcagcaccgacaccttcctgctccacctagctgtagcagacacgctgctggtgctgacactgccgctctgggcagtggacgctgccgtccagtgggtctttggctctggcctctgcaaagtggcaggtgccctcttcaacatcaacttctacgcaggagccctcctgctggcctgcatcagctttgaccgctacctgaacatagttcatgccacccagctctaccgccgggggcccccggcccgcgtgaccctcacctgcctggctgtctgggggctctgcctgcttttcgccctcccagacttcatcttcctgtcggcccaccacgacgagcgcctcaacgccacccactgccaatacaacttcccacaggtgggccgcacggctctgcgggtgctgcagctggtggctggctttctgctgcccctgctggtcatggcctactgctatgcccacatcctggccgtgctgctggtttccaggggccagcggcgcctgcgggccatgcggctggtggtggtggtcgtggtggcctttgccctctgctggaccccctatcacctggtggtgctggtggacatcctcatggacctgggcgctttggcccgcaactgtggccgagaaagcagggtagacgtggccaagtcggtcacctcaggcctgggctacatgcactgctgcctcaacccgctgctctatgcctttgtaggggtcaagttccgggagcggatgtggatgctgctcttgcgcctgggctgccccaaccagagagggctccagaggcagccatcgtcttcccgccgggattcatcctggtctgagacctcagaggcctcctactcgggcttgtga

SEQ ID NO: 180 - DNA, 1107 bp, synthetic construct
  source 1..1107: mol_type = other DNA
atggtccttgaggtgagtgaccaccaagtgctaaatgacgccgaggttgccgccctcctggagaacttcagctcttcctatgactatggagaaaacgagagtgactcgtgctgtacctccccgccctgcccacaggacttcagcctgaacttcgaccgggccttcctgccagccctctacagcctcctctttctgctggggctgctgggcaacggcgcggtggcagccgtgctgctgagccggcggacagccctgagcagcaccgacaccttcctgctccacctagctgtagcagacacgctgctggtgctgacactgccgctctgggcagtggacgctgccgtccagtgggtctttggctctggcctctgcaaagtggcaggtgccctcttcaacatcaacttctacgcaggagccctcctgctggcctgcatcagctttgaccgctacctgaacatagttcatgccacccagctctaccgccgggggcccccggcccgcgtgaccctcacctgcctggctgtctgggggctctgcctgcttttcgccctcccagacttcatcttcctgtcggcccaccacgacgagcgcctcaacgccacccactgccaatacaacttcccacaggtgggccgcacggctctgcgggtgctgcagctggtggctggctttctgctgcccctgctggtcatggcctactgctatgcccacatcctggccgtgctgctggtttccaggggccagcggcgcctgcgggccatgcggctggtggtggtggtcgtggtggcctttgccctctgctggaccccctatcacctggtggtgctggtggacatcctcatggacctgggcgctttggcccgcaactgtggccgagaaagcagggtagacgtggccaagtcggtcacctcaggcctgggctacatgcactgctgcctcaacccgctgctctatgcctttgtaggggtcaagttccgggagcggatgtggatgctgctcttgcgcctgggctgccccaaccagagagggctccagaggcagccatcgtcttcccgccgggattcatcctggtctgagacctcagaggcctcctactcgggcttgtga

SEQ ID NO: 181 - DNA, 1059 bp, synthetic construct
  source 1..1059: mol_type = other DNA
atggattatcaagtgtcaagtccaatctatgacatcaattattatacatcggagccctgccaaaaaatcaatgtgaagcaaatcgcagcccgcctcctgcctccgctctactcactggtgttcatctttggttttgtgggcaacatgctggtcatcctcatcctgataaactgcaaaaggctgaagagcatgactgacatctacctgctcaacctggccatctctgacctgtttttccttcttactgtccccttctgggctcactatgctgccgcccagtgggactttggaaatacaatgtgtcaactcttgacagggctctattttataggcttcttctctggaatcttcttcatcatcctcctgacaatcgataggtacctggctgtcgtccatgctgtgtttgctttaaaagccaggacggtcacctttggggtggtgacaagtgtgatcacttgggtggtggctgtgtttgcgtctctcccaggaatcatctttaccagatctcaaaaagaaggtcttcattacacctgcagctctcattttccatacagtcagtatcaattctggaagaatttccagacattaaagatagtcatcttggggctggtcctgccgctgcttgtcatggtcatctgctactcgggaatcctaaaaactctgcttcggtgtcgaaatgagaagaagaggcacagggctgtgaggcttatcttcaccatcatgattgtttattttctcttctgggctccctacaacattgtccttctcctgaacaccttccaggaattctttggcctgaataattgcagtagctctaacaggttggaccaagctatgcaggtgacagagactcttgggatgacgcactgctgcatcaaccccatcatctatgcctttgtcggggagaagttcagaaactacctcttagtcttcttccaaaagcacattgccaaacgcttctgcaaatgctgttctattttccagcaagaggctcccgagcgagcaagctcagtttacacccgatccactggggagcaggaaatatctgtgggcttgtga

SEQ ID NO: 182 - DNA, 1125 bp, synthetic construct
  source 1..1125: mol_type = other DNA
atgctgtccacatctcgttctcggtttatcagaaataccaacgagagcggtgaagaagtcaccaccttttttgattatgattacggtgctccctgtcataaatttgacgtgaagcaaattggggcccaactcctgcctccgctctactcgctggtgttcatctttggttttgtgggcaacatgctggtcgtcctcatcttaataaactgcaaaaagctgaagtgcttgactgacatttacctgctcaacctggccatctctgatctgctttttcttattactctcccattgtgggctcactctgctgcaaatgagtgggtctttgggaatgcaatgtgcaaattattcacagggctgtatcacatcggttattttggcggaatcttcttcatcatcctcctgacaatcgatagatacctggctattgtccatgctgtgtttgctttaaaagccaggacggtcacctttggggtggtgacaagtgtgatcacctggttggtggctgtgtttgcttctgtcccaggaatcatctttactaaatgccagaaagaagattctgtttatgtctgtggcccttattttccacgaggatggaataatttccacacaataatgaggaacattttggggctggtcctgccgctgctcatcatggtcatctgctactcgggaatcctgaaaaccctgcttcggtgtcgaaacgagaagaagaggcatagggcagtgagagtcatcttcaccatcatgattgtttactttctcttctggactccctataatattgtcattctcctgaacaccttccaggaattcttcggcctgagtaactgtgaaagcaccagtcaactggaccaagccacgcaggtgacagagactcttgggatgactcactgctgcatcaatcccatcatctatgccttcgttggggagaagttcagaagcctttttcacatagctcttggctgtaggattgccccactccaaaaaccagtgtgtggaggtccaggagtgagaccaggaaagaatgtgaaagtgactacacaaggactcctcgatggtcgtggaaaaggaaagtcaattggcagagcccctgaagccagtcttcaggacaaagaaggagcctag

SEQ ID NO: 183 - protein, 26 aa, synthetic construct
SGGGSGGGGSGGGGSGGGGSGGGSLQ

SEQ ID NO: 184 - protein, 254 aa, synthetic construct
MWQLLLPTALLLLVSAGMRTEDLPKAVVFLEPQWYRVLEKDSVTLKCQGAYSPEDNSTQWFHNESLISSQASSYFIDAATVDDSGEYRCQTNLSTLSDPVQLEVHIGWLLLQAPRWVFKEEDPIHLRCHSWKNTALHKVTYLQNGKGRKYFHHNSDFYIPKATLKDSGSYFCRGLVGSKNVSSETVNITITQGLAVSTISSFFPPGYQVSFCLVMVLLFAVDTGLYFSVKTNIRSSTRDWKDHKFKWRKDPQDK

SEQ ID NO: 185 - protein, 323 aa, synthetic construct
MWPLVAALLLGSACCGSAQLLFNKTKSVEFTFCNDTVVIPCFVTNMEAQNTTEVYVKWKFKGRDIYTFDGALNKSTVPTDFSSAKIEVSQLLKGDASLKMDKSDAVSHTGNYTCEVTELTREGETIIELKYRVVSWFSPNENILIVIFPIFAILLFWGQFGIKTLKYRSGGMDEKTIALLVAGLVITVIVIVGAILFVPGEYSLKNATGLGLIVTSTGILILLHYYVFSTAIGLTSFVIAILVIQVIAYILAVVGLSLCIAACIPMHGPLLISGLSILALAQLLGLVYMKFVASNQKTIQPPRKAVEEPLNAFKESKGMMNDE

SEQ ID NO: 186 - protein, 114 aa, synthetic construct
NWVNVISDLKKIEDLIQSMHIDATLYTESDVHPSCKVTAMKCFLLELQVISLESGDASIHDTVENLIILANNSLSSNGNVTESGCKECEELEEKNIKEFLQSFVHIVQMFINTS

SEQ ID NO: 187 - protein, 132 aa, synthetic construct
MDWTWILFLVAAATRVHSNWVNVISDLKKIEDLIQSMHIDATLYTESDVHPSCKVTAMKCFLLELQVISLESGDASIHDTVENLIILANNSLSSNGNVTESGCKECEELEEKNIKEFLQSFVHIVQMFINTS

SEQ ID NO: 188 - protein, 151 aa, synthetic construct
MDWTWILFLVAAATRVHSGIHVFILGCFSAGLPKTEANWVNVISDLKKIEDLIQSMHIDATLYTESDVHPSCKVTAMKCFLLELQVISLESGDASIHDTVENLIILANNSLSSNGNVTESGCKECEELEEKNIKEFLQSFVHIVQMFINTS

SEQ ID NO: 189 - protein, 237 aa, synthetic construct
ITCPPPMSVEHADIWVKSYSLYSRERYICNSGFKRKAGTSSLTECVLNKATNVAHWTTPSLKCIRDPALVHQRPAPPSTVTTAGVTPQPESLSPSGKEPAASSPSSNNTAATTAAIVPGSQLMPSKSPSTGTTEISSHESSHGTPSQTTAKNWELTASASHQPPGVYPQGHSDTTVAISTSTVLLCGLSAVSLLACYLKSRQTPPLASVEMEAMEALPVTWGTSSRDEDLENCSHHL

SEQ ID NO: 190 - protein, 395 aa, synthetic construct [sequence omitted]

SEQ ID NO: 191 - protein, 414 aa, synthetic construct
MDWTWILFLVAAATRVHSGIHVFILGCFSAGLPKTEANWVNVISDLKKIEDLIQSMHIDATLYTESDVHPSCKVTAMKCFLLELQVISLESGDASIHDTVENLIILANNSLSSNGNVTESGCKECEELEEKNIKEFLQSFVHIVQMFINTSSGGGSGGGGSGGGGSGGGGSGGGSLQITCPPPMSVEHADIWVKSYSLYSRERYICNSGFKRKAGTSSLTECVLNKATNVAHWTTPSLKCIRDPALVHQRPAPPSTVTTAGVTPQPESLSPSGKEPAASSPSSNNTAATTAAIVPGSQLMPSKSPSTGTTEISSHESSHGTPSQTTAKNWELTASASHQPPGVYPQGHSDTTVAISTSTVLLCGLSAVSLLACYLKSRQTPPLASVEMEAMEALPVTWGTSSRDEDLENCSHHL

SEQ ID NO: 192 - protein, 671 aa, synthetic construct
MWQLLLPTALLLLVSAGMRTEDLPKAVVFLEPQWYRVLEKDSVTLKCQGAYSPEDNSTQWFHNESLISSQASSYFIDAATVDDSGEYRCQTNLSTLSDPVQLEVHIGWLLLQAPRWVFKEEDPIHLRCHSWKNTALHKVTYLQNGKGRKYFHHNSDFYIPKATLKDSGSYFCRGLVGSKNVSSETVNITITQGLAVSTISSFFPPGYQVSFCLVMVLLFAVDTGLYFSVKTNIRSSTRDWKDHKFKWRKDPQDKGSGATNFSLLKQAGDVEENPGPMDWTWILFLVAAATRVHSNWVNVISDLKKIEDLIQSMHIDATLYTESDVHPSCKVTAMKCFLLELQVISLESGDASIHDTVENLIILANNSLSSNGNVTESGCKECEELEEKNIKEFLQSFVHIVQMFINTSSGGGSGGGGSGGGGSGGGGSGGGSLQITCPPPMSVEHADIWVKSYSLYSRERYICNSGFKRKAGTSSLTECVLNKATNVAHWTTPSLKCIRDPALVHQRPAPPSTVTTAGVTPQPESLSPSGKEPAASSPSSNNTAATTAAIVPGSQLMPSKSPSTGTTEISSHESSHGTPSQTTAKNWELTASASHQPPGVYPQGHSDTTVAISTSTVLLCGLSAVSLLACYLKSRQTPPLASVEMEAMEALPVTWGTSSRDEDLENCSHHL

SEQ ID NO: 193 - protein, 489 aa, synthetic construct
MLLLVTSLLLCELPHPAFLLIPDIQMTQTTSSLSASLGDRVTISCRASQDISKYLNWYQQKPDGTVKLLIYHTSRLHSGVPSRFSGSGSGTDYSLTISNLEQEDIATYFCQQGNTLPYTFGGGTKLEITGSTSGSGKPGSGEGSTKGEVKLQESGPGLVAPSQSLSVTCTVSGVSLPDYGVSWIRQPPRKGLEWLGVIWGSETTYYNSALKSRLTIIKDNSKSQVFLKMNSLQTDDTAIYYCAKHYYYGGSYAMDYWGQGTSVTVSSAAAIEVMYPPPYLDNEKSNGTIIHVKGKHLCPSPLFPGPSKPFWVLVVVGGVLACYSLLVTVAFIIFWVRSKRSRLLHSDYMNMTPRRPGPTRKHYQPYAPPRDFAAYRSRVKFSRSADAPAYQQGQNQLYNELNLGRREEYDVLDKRRGRDPEMGGKPRRKNPQEGLYNELQKDKMAEAYSEIGMKGERRRGKGHDGLYQGLSTATKDTYDALHMQALPPR

SEQ ID NO: 194 - protein, 494 aa, synthetic construct
MALPVTALLLPLALLLHAARPMDEVQLVESGGGLVQPGGSLRLSCAASGFSFTNYGVHWVRQAPGKGLEWVSVIWSGGNTDYNTSVKGRFTISRDNSKNTLYLQMNSLRAEDTAVYYCARALTYYDYEFAYWGQGTLVTVSSGGGGSGGGGSGGGGSEIVLTQSPATLSLSPGERATLSCRASQSIGTNIHWYQQKPGQAPRLLIYYASESISGIPARFSGSGSGTDFTLTISSLEPEDFAVYYCQQNNNWPTTFGQGTKLEIKGSLEAAATTTPAPRPPTPAPTIASQPLSLRPEACRPAAGGAVHTRGLDFACDIYIWAPLAGTCGVLLLSLVITLYCKRGRKKLLYIFKQPFMRPVQTTQEEDGCSCRFPEEEEGGCELRVKFSRSADAPAYQQGQNQLYNELNLGRREEYDVLDKRRGRDPEMGGKPRRKNPQEGLYNELQKDKMAEAYSEIGMKGERRRGKGHDGLYQGLSTATKDTYDALHMQALPPR

SEQ ID NO: 195 - protein, 239 aa, synthetic construct
MVSKGEELFTGVVPILVELDGDVNGHKFSVSGEGEGDATYGKLTLKFICTTGKLPVPWPTLVTTLTYGVQCFSRYPDHMKQHDFFKSAMPEGYVQERTIFFKDDGNYKTRAEVKFEGDTLVNRIELKGIDFKEDGNILGHKLEYNYNSHNVYIMADKQKNGIKVNFKIRHNIEDGSVQLADHYQQNTPIGDGPVLLPDNHYLSTQSALSKDPNEKRDHMVLLEFVTAAGITLGMDELYK

SEQ ID NO: 196 - protein, 350 aa, synthetic construct
MSNITDPQMWDFDDLNFTGMPPADEDYSPCMLETETLNKYVVIIAYALVFLLSLLGNSLVMLVILYSRVGRSVTDVYLLNLALADLLFALTLPIWAASKVNGWIFGTFLCKVVSLLKEVNFYSGILLLACISVDRYLAIVHATRTLTQKRHLVKFVCLGCWGLSMNLSLPFFLFRQAYHPNNSSPVCYEVLGNDTAKWRMVLRILPHTFGFIVPLFVMLFCYGFTLRTLFKAHMGQKHRAMRVIFAVVLIFLLCWLPYNLVLLADTLMRTQVIQESCERRNNIGRALDATEILGFLHSCLNPIIYAFIGQNFRHGFLKILAMHGLVSKEFLARHRVTSYTSSSVNVSSNL

SEQ ID NO: 197 - protein, 415 aa, synthetic construct
MELRKYGPGRLAGTVIGGAAQSKSQTKSDSITKEFLPGLYTAPSSPFPPSQVSDHQVLNDAEVAALLENFSSSYDYGENESDSCCTSPPCPQDFSLNFDRAFLPALYSLLFLLGLLGNGAVAAVLLSRRTALSSTDTFLLHLAVADTLLVLTLPLWAVDAAVQWVFGSGLCKVAGALFNINFYAGALLLACISFDRYLNIVHATQLYRRGPPARVTLTCLAVWGLCLLFALPDFIFLSAHHDERLNATHCQYNFPQVGRTALRVLQLVAGFLLPLLVMAYCYAHILAVLLVSRGQRRLRAMRLVVVVVVAFALCWTPYHLVVLVDILMDLGALARNCGRESRVDVAKSVTSGLGYMHCCLNPLLYAFVGVKFRERMWMLLLRLGCPNQRGLQRQPSSSRRDSSWSETSEASYSGL

SEQ ID NO: 198 - protein, 368 aa, synthetic construct
MVLEVSDHQVLNDAEVAALLENFSSSYDYGENESDSCCTSPPCPQDFSLNFDRAFLPALYSLLFLLGLLGNGAVAAVLLSRRTALSSTDTFLLHLAVADTLLVLTLPLWAVDAAVQWVFGSGLCKVAGALFNINFYAGALLLACISFDRYLNIVHATQLYRRGPPARVTLTCLAVWGLCLLFALPDFIFLSAHHDERLNATHCQYNFPQVGRTALRVLQLVAGFLLPLLVMAYCYAHILAVLLVSRGQRRLRAMRLVVVVVVAFALCWTPYHLVVLVDILMDLGALARNCGRESRVDVAKSVTSGLGYMHCCLNPLLYAFVGVKFRERMWMLLLRLGCPNQRGLQRQPSSSRRDSSWSETSEASYSGL

SEQ ID NO: 199 - protein, 352 aa, synthetic construct [sequence omitted]

SEQ ID NO: 200 - protein, 374 aa, synthetic construct
MLSTSRSRFIRNTNESGEEVTTFFDYDYGAPCHKFDVKQIGAQLLPPLYSLVFIFGFVGNMLVVLILINCKKLKCLTDIYLLNLAISDLLFLITLPLWAHSAANEWVFGNAMCKLFTGLYHIGYFGGIFFIILLTIDRYLAIVHAVFALKARTVTFGVVTSVITWLVAVFASVPGIIFTKCQKEDSVYVCGPYFPRGWNNFHTIMRNILGLVLPLLIMVICYSGILKTLLRCRNEKKRHRAVRVIFTIMIVYFLFWTPYNIVILLNTFQEFFGLSNCESTSQLDQATQVTETLGMTHCCINPIIYAFVGEKFRSLFHIALGCRIAPLQKPVCGGPGVRPGKNVKVTTQGLLDGRGKGKSIGRAPEASLQDKEGA

SEQ ID NO: 201 - DNA, 2456 bp, synthetic construct
  source 1..2456: mol_type = other DNA
cctgcaggcagctgcgcgctcgctcgctcactgaggccgcccgggcaaagcccgggcgtcgggcgacctttggtcgcccggcctcagtgagcgagcgagcgcgcagagagggagtggccaactccatcactaggggttcctgtcgacgaagactgtggatggcccctccgggaaactgtggcgtgatggccgcggggctctccagaacatcatccctgcctctactggcgctgccaaggctgtgggcaaggtcatccctgagctgaacgggaagctcactggcatggccttccgtgtccccactgccaacgtgtcagtggtggacctgacctgccgtctagaaaaacctgccaaatatgatgacatcaagaaggtggtgaagcaggcgtcggagggccccctcaagggcatcctgggctacactgagcaccaggtggtctcctctgacttcaacagcgacacccactcctccacctttgacgctggggctggcattgccctcaacgaccactttgtcaagctcatttcctggtatgtggctggggccagagactggctcttaaaaagtgcagggtctggcgccctctggtggctggctcagaaaaagggccctgacaactctttacatcttctaggtatgacaacgagttcggatatagcaatagagtggtcgatctgatggctcatatggctagcaaagagggaagcggagctactaacttcagcctgctgaagcaggctggagacgtggaggagaaccctggacctatgtggcaactgctgctgcctacagctctgctgcttctggtgtctgccggcatgagaaccgaggatctgcctaaggccgtggtgttcctggaacctcagtggtacagagtgctggaaaaggacagcgtgaccctgaagtgccagggcgcctattctcccgaggacaatagcacccagtggttccacaacgagagcctgatcagcagccaggccagcagctactttatcgatgccgccaccgtggacgacagcggcgagtacagatgccagaccaatctgagcaccctgagcgaccctgtgcagctggaagtgcacattggatggttgctgctgcaagcccctagatgggtgttcaaagaagaggaccccatccacctgagatgccactcttggaagaacacagccctgcacaaagtgacctacctgcagaacggcaagggcagaaagtacttccaccacaacagcgacttctacatccccaaggccacactgaaggactccggctcctacttctgcagaggcctggtcggcagcaagaacgtgtccagcgagacagtgaacatcaccatcacacagggcctcgccgtgtctaccatcagcagctttttcccacctggctatcaggtgtccttctgcctggtcatggtgctgctgttcgccgtggataccggcctgtacttcagcgtcaagaccaacatccggtccagcaccagagactggaaggaccacaagttcaagtggcggaaggaccctcaggacaagtaagcggccgcgtcgagtctagagggcccgtttaaacccgctgatcagcctcgactgtgccttctagttgccagccatctgttgtttgcccctcccccgtgccttccttgaccctggaaggtgccactcccactgtcctttcctaataaaatgaggaaattgcatcgcattgtctgagtaggtgtcattctattctggggggtggggtggggcaggacagcaagggggaggattgggaagacaatagcaggcatgctggggatgcggtgggctctatggatttggctacagcaacagggtggtggacctcatggcccacatggcctccaaggagtaagacccctggaccaccagccccagcaagagcacaagaggaagagagagaccctcactgctggggagtccctgccacactcagtcccccaccacactgaatctcccctcctcacagttgccatgtagaccccttgaagaggggaggggcctagggagccgcaccttgtcatgtaccatcaataaagtaccctgtgctcaaccagttacttgtcctgtcttattctagggtctggggcagaggggagggaagctgggcttgtgtcaaggtgagacattcttgctggggagggacctggtatgttctcctcagactgagggtagggcctccaaacagccttgcttgcttcgagaaccatttgcttcccgctcagacgtcttgagtgctacaggaagctggcaccactacttcagagaacaaggccttttcctctcctcgctccagtagatctaggaacccctagtgatggagttggccactccctctctgcgcgctcgctcgctcactgaggccgggcgaccaaaggtcgcccgacgcccgggctttgcccgggcggcctcagtgagcgagcgagcgcgcagctgcctgcagg

SEQ ID NO: 202 - DNA, 2411 bp, synthetic construct
  source 1..2411: mol_type = other DNA
cctgcaggcagctgcgcgctcgctcgctcactgaggccgcccgggcaaagcccgggcgtcgggcgacctttggtcgcccggcctcagtgagcgagcgagcgcgcagagagggagtggccaactccatcactaggggttcctgtcgacgaagactgtggatggcccctccgggaaactgtggcgtgatggccgcggggctctccagaacatcatccctgcctctactggcgctgccaaggctgtgggcaaggtcatccctgagctgaacgggaagctcactggcatggccttccgtgtccccactgccaacgtgtcagtggtggacctgacctgccgtctagaaaaacctgccaaatatgatgacatcaagaaggtggtgaagcaggcgtcggagggccccctcaagggcatcctgggctacactgagcaccaggtggtctcctctgacttcaacagcgacacccactcctccacctttgacgctggggctggcattgccctcaacgaccactttgtcaagctcatttcctggtatgtggctggggccagagactggctcttaaaaagtgcagggtctggcgccctctggtggctggctcagaaaaagggccctgacaactctttacatcttctaggtatgacaacgagttcggatatagcaatagagtggtcgatctgatggctcatatggctagcaaagagggaagcggagctactaacttcagcctgctgaagcaggctggagacgtggaggagaaccctggacctatggtgagcaagggcgaggagctgttcaccggggtggtgcccatcctggtcgagctggacggcgacgtaaacggccacaagttcagcgtgtccggcgagggcgagggcgatgccacctacggcaagctgaccctgaagttcatctgcaccaccggcaagctgcccgtgccctggcccaccctcgtgaccaccctgacctacggcgtgcagtgcttcagccgctaccccgaccacatgaagcagcacgacttcttcaagtccgccatgcccgaaggctacgtccaggagcgcaccatcttcttcaaggacgacggcaactacaagacccgcgccgaggtgaagttcgagggcgacaccctggtgaaccgcatcgagctgaagggcatcgacttcaaggaggacggcaacatcctggggcacaagctggagtacaactacaacagccacaacgtctatatcatggccgacaagcagaagaacggcatcaaggtgaacttcaagatccgccacaacatcgaggacggcagcgtgcagctcgccgaccactaccagcagaacacccccatcggcgacggccccgtgctgctgcccgacaaccactacctgagcacccagtccgccctgagcaaagaccccaacgagaagcgcgatcacatggtcctgctggagttcgtgaccgccgccgggatcactctcggcatggacgagctgtacaagtgagcggccgcgtcgagtctagagggcccgtttaaacccgctgatcagcctcgactgtgccttctagttgccagccatctgttgtttgcccctcccccgtgccttccttgaccctggaaggtgccactcccactgtcctttcctaataaaatgaggaaattgcatcgcattgtctgagtaggtgtcattctattctggggggtggggtggggcaggacagcaagggggaggattgggaagacaatagcaggcatgctggggatgcggtgggctctatggatttggctacagcaacagggtggtggacctcatggcccacatggcctccaaggagtaagacccctggaccaccagccccagcaagagcacaagaggaagagagagaccctcactgctggggagtccctgccacactcagtcccccaccacactgaatctcccctcctcacagttgccatgtagaccccttgaagaggggaggggcctagggagccgcaccttgtcatgtaccatcaataaagtaccctgtgctcaaccagttacttgtcctgtcttattctagggtctggggcagaggggagggaagctgggcttgtgtcaaggtgagacattcttgctggggagggacctggtatgttctcctcagactgagggtagggcctccaaacagccttgcttgcttcgagaaccatttgcttcccgctcagacgtcttgagtgctacaggaagctggcaccactacttcagagaacaaggccttttcctctcctcgctccagtagatctaggaacccctagtgatggagttggccactccctctctgcgcgctcgctcgctcactgaggccgggcgaccaaaggtcgcccgacgcccgggctttgcccgggcggcctcagtgagcgagcgagcgcgcagctgcctgcagg

SEQ ID NO: 203 - DNA, 3162 bp, synthetic construct
  source 1..3162: mol_type = other DNA
cctgcaggcagctgcgcgctcgctcgctcactgaggccgcccgggcaaagcccgggcgtcgggcgacctttggtcgcccggcctcagtgagcgagcgagcgcgcagagagggagtggccaactccatcactaggggttcctgtcgacgaagactgtggatggcccctccgggaaactgtggcgtgatggccgcggggctctccagaacatcatccctgcctctactggcgctgccaaggctgtgggcaaggtcatccctgagctgaacgggaagctcactggcatggccttccgtgtccccactgccaacgtgtcagtggtggacctgacctgccgtctagaaaaacctgccaaatatgatgacatcaagaaggtggtgaagcaggcgtcggagggccccctcaagggcatcctgggctacactgagcaccaggtggtctcctctgacttcaacagcgacacccactcctccacctttgacgctggggctggcattgccctcaacgaccactttgtcaagctcatttcctggtatgtggctggggccagagactggctcttaaaaagtgcagggtctggcgccctctggtggctggctcagaaaaagggccctgacaactctttacatcttctaggtatgacaacgagttcggatatagcaatagagtggtcgatctgatggctcatatggctagcaaagagggaagcggagctactaacttcagcctgctgaagcaggctggagacgtggaggagaaccctggacctatgcttctcctggtgacaagccttctgctctgtgagttaccacacccagcattcctcctgatcccagacatccagatgacacagactacatcctccctgtctgcctctctgggagacagagtcaccatcagttgcagggcaagtcaggacattagtaaatatttaaattggtatcagcagaaaccagatggaactgttaaactcctgatctaccatacatcaagattacactcaggagtcccatcaaggttcagtggcagtgggtctggaacagattattctctcaccattagcaacctggagcaagaagatattgccacttacttttgccaacagggtaatacgcttccgtacacgttcggaggggggactaagttggaaataacaggctccacctctggatccggcaagcccggatctggcgagggatccaccaagggcgaggtgaaactgcaggagtcaggacctggcctggtggcgccctcacagagcctgtccgtcacatgcactgtctcaggggtctcattacccgactatggtgtaagctggattcgccagcctccacgaaagggtctggagtggctgggagtaatatggggtagtgaaaccacatactataattcagctctcaaatccagactgaccatcatcaaggacaactccaagagccaagttttcttaaaaatgaacagtctgcaaactgatgacacagccatttactactgtgccaaacattattactacggtggtagctatgctatggactactggggtcaaggaacctcagtcaccgtctcctcagcggccgcaattgaagttatgtatcctcctccttacctagacaatgagaagagcaatggaaccattatccatgtgaaagggaaacacctttgtccaagtcccctatttcccggaccttctaagcccttttgggtgctggtggtggttgggggagtcctggcttgctatagcttgctagtaacagtggcctttattattttctgggtgaggagtaagaggagcaggctcctgcacagtgactacatgaacatgactccccgccgccccgggcccacccgcaagcattaccagccctatgccccaccacgcgacttcgcagcctatcgctccagagtgaagttcagcaggagcgcagacgcccccgcgtaccagcagggccagaaccagctctataacgagctcaatctaggacgaagagaggagtacgatgttttggacaagagacgtggccgggaccctgagatggggggaaagccgagaaggaagaaccctcaggaaggcctgtacaatgaactgcagaaagataagatggcggaggcctacagtgagattgggatgaaaggcgagcgccggaggggcaaggggcacgatggcctttaccagggtctcagtacagccaccaaggacacctacgacgcccttcacatgcaggccctgccccctcgctaaagcggccgcgtcgagtctagagggcccgtttaaacccgctgatcagcctcgactgtgccttctagttgccagccatctgttgtttgcccctcccccgtgccttccttgaccctggaaggtgccactcccactgtcctttcctaataaaatgaggaaattgcatcgcattgtctgagtaggtgtcattctattctggggggtggggtggggcaggacagcaagggggaggattgggaagacaatagcaggcatgctggggatgcggtgggctctatggatttggctacagcaacagggtggtggacctcatggcccacatggcctccaaggagtaagacccctggaccaccagccccagcaagagcacaagaggaagagagagaccctcactgctggggagtccctgccacactcagtcccccaccacactgaatctcccctcctcacagttgccatgtagaccccttgaagaggggaggggcctagggagccgcaccttgtcatgtaccatcaataaagtaccctgtgctcaaccagttacttgtcctgtcttattctagggtctggggcagaggggagggaagctgggcttgtgtcaaggtgagacattcttgctggggagggacctggtatgttctcctcagactgagggtagggcctccaaacagccttgcttgcttcgagaaccatttgcttcccgctcagacgtcttgagtgctacaggaagctggcaccactacttcagagaacaaggccttttcctctcctcgctccagtagatctaggaacccctagtgatggagttggccactccctctctgcgcgctcgctcgctcactgaggccgggcgaccaaaggtcgcccgacgcccgggctttgcccgggcggcctcagtgagcgagcgagcgcgcagctgcctgcagg

SEQ ID NO: 204 - DNA, 3177 bp, synthetic construct
  source 1..3177: mol_type = other DNA
cctgcaggcagctgcgcgctcgctcgctcactgaggccgcccgggcaaagcccgggcgtcgggcgacctttggtcgcccggcctcagtgagcgagcgagcgcgcagagagggagtggccaactccatcactaggggttcctgtcgacgaagactgtggatggcccctccgggaaactgtggcgtgatggccgcggggctctccagaacatcatccctgcctctactggcgctgccaaggctgtgggcaaggtcatccctgagctgaacgggaagctcactggcatggccttccgtgtccccactgccaacgtgtcagtggtggacctgacctgccgtctagaaaaacctgccaaatatgatgacatcaagaaggtggtgaagcaggcgtcggagggccccctcaagggcatcctgggctacactgagcaccaggtggtctcctctgacttcaacagcgacacccactcctccacctttgacgctggggctggcattgccctcaacgaccactttgtcaagctcatttcctggtatgtggctggggccagagactggctcttaaaaagtgcagggtctggcgccctctggtggctggctcagaaaaagggccctgacaactctttacatcttctaggtatgacaacgagttcggatatagcaatagagtggtcgatctgatggctcatatggctagcaaagagggaagcggagctactaacttcagcctgctgaagcaggctggagacgtggaggagaaccctggacctatggcactccccgtcaccgcccttctcttgcccctcgccctgctgctgcatgctgccaggcccatggacgaagtgcagctcgtggagtccggtggaggactcgtccaaccgggcggatcccttcgcttgtcctgcgccgcatcaggcttcagcttcaccaactatggcgtccactgggtcagacaggcccccggaaagggactggaatgggtgtccgtgatctggagcggcgggaacaccgactacaacacctccgtgaagggccggttcactattagccgcgacaactccaagaacactctgtacctccaaatgaactccctgagggccgaagatactgctgtgtactattgcgcgagagccctgacctactacgactacgagttcgcgtactggggccaggggactctcgtgaccgtgtccagcggtggtggaggttccggaggcggaggttctggtggcgggggatcagaaatcgtgctgactcagtcccctgcgaccttgtccctgagccctggagaacgggccaccctgagctgtagagccagccagagcatcgggacaaatattcactggtaccagcagaaacccggacaagcaccacggctgctgatctactacgcctccgagtcgatttccggaatcccggctcgcttttcggggtctggatcgggaacggacttcactctgaccatctcgtcgctggaacccgaggatttcgccgtgtactactgccaacagaacaacaattggccgaccacgttcggccagggcaccaagctcgagattaagggatcactggaagcggccgcaaccacaacacctgctccaaggccccccacacccgctccaactatagccagccaaccattgagcctcagacctgaagcttgcaggcccgcagcaggaggcgccgtccatacgcgaggcctggacttcgcgtgtgatatttatatttgggcccctttggccggaacatgtggggtgttgcttctctcccttgtgatcactctgtattgtaagcgcgggagaaagaagctcctgtacatcttcaagcagccttttatgcgacctgtgcaaaccactcaggaagaagatgggtgttcatgccgcttccccgaggaggaagaaggagggtgtgaactgagggtgaaattttctagaagcgccgatgctcccgcatatcagcagggtcagaatcagctctacaatgaattgaatctcggcaggcgagaagagtacgatgttctggacaagagacggggcagggatcccgagatggggggaaagccccggagaaaaaatcctcaggaggggttgtacaatgagctgcagaaggacaagatggctgaagcctatagcgagatcggaatgaaaggcgaaagacgcagaggcaaggggcatgacggtctgtaccagggtctctctacagccaccaaggacacttatgatgcgttgcatatgcaagccttgccaccccgctaaagcggccgcgtcgagtctagagggcccgtttaaacccgctgatcagcctcgactgtgccttctagttgccagccatctgttgtttgcccctcccccgtgccttccttgaccctggaaggtgccactcccactgtcctttcctaataaaatgaggaaattgcatcgcattgtctgagtaggtgtcattctattctggggggtggggtggggcaggacagcaagggggaggattgggaagacaatagcaggcatgctggggatgcggtgggctctatggatttggctacagcaacagggtggtggacctcatggcccacatggcctccaaggagtaagacccctggaccaccagccccagcaagagcacaagaggaagagagagaccctcactgctggggagtccctgccacactcagtcccccaccacactgaatctcccctcctcacagttgccatgtagaccccttgaagaggggaggggcctagggagccgcaccttgtcatgtaccatcaataaagtaccctgtgctcaaccagttacttgtcctgtcttattctagggtctggggcagaggggagggaagctgggcttgtgtcaaggtgagacattcttgctggggagggacctggtatgttctcctcagactgagggtagggcctccaaacagccttgcttgcttcgagaaccatttgcttcccgctcagacgtcttgagtgctacaggaagctggcaccactacttcagagaacaaggccttttcctctcctcgctccagtagatctaggaacccctagtgatggagttggccactccctctctgcgcgctcgctcgctcactgaggccgggcgaccaaaggtcgcccgacgcccgggctttgcccgggcggcctcagtgagcgagcgagcgcgcagctgcctgcagg

SEQ ID NO: 205 - DNA, 2162 bp, synthetic construct
  source 1..2162: mol_type = other DNA
gaagactgtggatggcccctccgggaaactgtggcgtgatggccgcggggctctccagaacatcatccctgcctctactggcgctgccaaggctgtgggcaaggtcatccctgagctgaacgggaagctcactggcatggccttccgtgtccccactgccaacgtgtcagtggtggacctgacctgccgtctagaaaaacctgccaaatatgatgacatcaagaaggtggtgaagcaggcgtcggagggccccctcaagggcatcctgggctacactgagcaccaggtggtctcctctgacttcaacagcgacacccactcctccacctttgacgctggggctggcattgccctcaacgaccactttgtcaagctcatttcctggtatgtggctggggccagagactggctcttaaaaagtgcagggtctggcgccctctggtggctggctcagaaaaagggccctgacaactctttacatcttctaggtatgacaacgagttcggatatagcaatagagtggtcgatctgatggctcatatggctagcaaagagggaagcggagctactaacttcagcctgctgaagcaggctggagacgtggaggagaaccctggacctatgtggcaactgctgctgcctacagctctgctgcttctggtgtctgccggcatgagaaccgaggatctgcctaaggccgtggtgttcctggaacctcagtggtacagagtgctggaaaaggacagcgtgaccctgaagtgccagggcgcctattctcccgaggacaatagcacccagtggttccacaacgagagcctgatcagcagccaggccagcagctactttatcgatgccgccaccgtggacgacagcggcgagtacagatgccagaccaatctgagcaccctgagcgaccctgtgcagctggaagtgcacattggatggttgctgctgcaagcccctagatgggtgttcaaagaagaggaccccatccacctgagatgccactcttggaagaacacagccctgcacaaagtgacctacctgcagaacggcaagggcagaaagtacttccaccacaacagcgacttctacatccccaaggccacactgaaggactccggctcctacttctgcagaggcctggtcggcagcaagaacgtgtccagcgagacagtgaacatcaccatcacacagggcctcgccgtgtctaccatcagcagctttttcccacctggctatcaggtgtccttctgcctggtcatggtgctgctgttcgccgtggataccggcctgtacttcagcgtcaagaccaacatccggtccagcaccagagactggaaggaccacaagttcaagtggcggaaggaccctcaggacaagtaagcggccgcgtcgagtctagagggcccgtttaaacccgctgatcagcctcgactgtgccttctagttgccagccatctgttgtttgcccctcccccgtgccttccttgaccctggaaggtgccactcccactgtcctttcctaataaaatgaggaaattgcatcgcattgtctgagtaggtgtcattctattctggggggtggggtggggcaggacagcaagggggaggattgggaagacaatagcaggcatgctggggatgcggtgggctctatggatttggctacagcaacagggtggtggacctcatggcccacatggcctccaaggagtaagacccctggaccaccagccccagcaagagcacaagaggaagagagagaccctcactgctggggagtccctgccacactcagtcccccaccacactgaatctcccctcctcacagttgccatgtagaccccttgaagaggggaggggcctagggagccgcaccttgtcatgtaccatcaataaagtaccctgtgctcaaccagttacttgtcctgtcttattctagggtctggggcagaggggagggaagctgggcttgtgtcaaggtgagacattcttgctggggagggacctggtatgttctcctcagactgagggtagggcctccaaacagccttgcttgcttcgagaaccatttgcttcccgctcagacgtcttgagtgctacaggaagctggcaccactacttcagagaacaaggccttttcctctcctcgctccagt

SEQ ID NO: 206 - DNA, 2874 bp, synthetic construct
  source 1..2874: mol_type = other DNA
gtcgacgaagactgtggatggcccctccgggaaactgtggcgtgatggccgcggggctctccagaacatcatccctgcctctactggcgctgccaaggctgtgggcaaggtcatccctgagctgaacgggaagctcactggcatggccttccgtgtccccactgccaacgtgtcagtggtggacctgacctgccgtctagaaaaacctgccaaatatgatgacatcaagaaggtggtgaagcaggcgtcggagggccccctcaagggcatcctgggctacactgagcaccaggtggtctcctctgacttcaacagcgacacccactcctccacctttgacgctggggctggcattgccctcaacgaccactttgtcaagctcatttcctggtatgtggctggggccagagactggctcttaaaaagtgcagggtctggcgccctctggtggctggctcagaaaaagggccctgacaactctttacatcttctaggtatgacaacgagttcggatatagcaatagagtggtcgatctgatggctcatatggctagcaaagagggaagcggagctactaacttcagcctgctgaagcaggctggagacgtggaggagaaccctggacctatgcttctcctggtgacaagccttctgctctgtgagttaccacacccagcattcctcctgatcccagacatccagatgacacagactacatcctccctgtctgcctctctgggagacagagtcaccatcagttgcagggcaagtcaggacattagtaaatatttaaattggtatcagcagaaaccagatggaactgttaaactcctgatctaccatacatcaagattacactcaggagtcccatcaaggttcagtggcagtgggtctggaacagattattctctcaccattagcaacctggagcaagaagatattgccacttacttttgccaacagggtaatacgcttccgtacacgttcggaggggggactaagttggaaataacaggctccacctctggatccggcaagcccggatctggcgagggatccaccaagggcgaggtgaaactgcaggagtcaggacctggcctggtggcgccctcacagagcctgtccgtcacatgcactgtctcaggggtctcattacccgactatggtgtaagctggattcgccagcctccacgaaagggtctggagtggctgggagtaatatggggtagtgaaaccacatactataattcagctctcaaatccagactgaccatcatcaaggacaactccaagagccaagttttcttaaaaatgaacagtctgcaaactgatgacacagccatttactactgtgccaaacattattactacggtggtagctatgctatggactactggggtcaaggaacctcagtcaccgtctcctcagcggccgcaattgaagttatgtatcctcctccttacctagacaatgagaagagcaatggaaccattatccatgtgaaagggaaacacctttgtccaagtcccctatttcccggaccttctaagcccttttgggtgctggtggtggttgggggagtcctggcttgctatagcttgctagtaacagtggcctttattattttctgggtgaggagtaagaggagcaggctcctgcacagtgactacatgaacatgactccccgccgccccgggcccacccgcaagcattaccagccctatgccccaccacgcgacttcgcagcctatcgctccagagtgaagttcagcaggagcgcagacgcccccgcgtaccagcagggccagaaccagctctataacgagctcaatctaggacgaagagaggagtacgatgttttggacaagagacgtggccgggaccctgagatggggggaaagccgagaaggaagaaccctcaggaaggcctgtacaatgaactgcagaaagataagatggcggaggcctacagtgagattgggatgaaaggcgagcgccggaggggcaaggggcacgatggcctttaccagggtctcagtacagccaccaaggacacctacgacgcccttcacatgcaggccctgccccctcgctaaagcggccgcgtcgagtctagagggcccgtttaaacccgctgatcagcctcgactgtgccttctagttgccagccatctgttgtttgcccctcccccgtgccttccttgaccctggaaggtgccactcccactgtcctttcctaataaaatgaggaaattgcatcgcattgtctgagtaggtgtcattctattctggggggtggggtggggcaggacagcaagggggaggattgggaagacaatagcaggcatgctggggatgcggtgggctctatggatttggctacagcaacagggtggtggacctcatggcccacatggcctccaaggagtaagacccctggaccaccagccccagcaagagcacaagaggaagagagagaccctcactgctggggagtccctgccacactcagtcccccaccacactgaatctcccctcctcacagttgccatgtagaccccttgaagaggggaggggcctagggagccgcaccttgtcatgtaccatcaataaagtaccctgtgctcaaccagttacttgtcctgtcttattctagggtctggggcagaggggagggaagctgggcttgtgtcaaggtgagacattcttgctggggagggacctggtatgttctcctcagactgagggtagggcctccaaacagccttgcttgcttcgagaaccatttgcttcccgctcagacgtcttgagtgctacaggaagctggcaccactacttcagagaacaaggccttttcctctcctcgctccagt

SEQ ID NO: 207 - DNA, 2889 bp, synthetic construct
  source 1..2889: mol_type = other DNA
gtcgacgaagactgtggatggcccctccgggaaactgtggcgtgatggccgcggggctctccagaacatcatccctgcctctactggcgctgccaaggctgtgggcaaggtcatccctgagctgaacgggaagctcactggcatggccttccgtgtccccactgccaacgtgtcagtggtggacctgacctgccgtctagaaaaacctgccaaatatgatgacatcaagaaggtggtgaagcaggcgtcggagggccccctcaagggcatcctgggctacactgagcaccaggtggtctcctctgacttcaacagcgacacccactcctccacctttgacgctggggctggcattgccctcaacgaccactttgtcaagctcatttcctggtatgtggctggggccagagactggctcttaaaaagtgcagggtctggcgccctctggtggctggctcagaaaaagggccctgacaactctttacatcttctaggtatgacaacgagttcggatatagcaatagagtggtcgatctgatggctcatatggctagcaaagagggaagcggagctactaacttcagcctgctgaagcaggctggagacgtggaggagaaccctggacctatggcactccccgtcaccgcccttctcttgcccctcgccctgctgctgcatgctgccaggcccatggacgaagtgcagctcgtggagtccggtggaggactcgtccaaccgggcggatcccttcgcttgtcctgcgccgcatcaggcttcagcttcaccaactatggcgtccactgggtcagacaggcccccggaaagggactggaatgggtgtccgtgatctggagcggcgggaacaccgactacaacacctccgtgaagggccggttcactattagccgcgacaactccaagaacactctgtacctccaaatgaactccctgagggccgaagatactgctgtgtactattgcgcgagagccctgacctactacgactacgagttcgcgtactggggccaggggactctcgtgaccgtgtccagcggtggtggaggttccggaggcggaggttctggtggcgggggatcagaaatcgtgctgactcagtcccctgcgaccttgtccctgagccctggagaacgggccaccctgagctgtagagccagccagagcatcgggacaaatattcactggtaccagcagaaacccggacaagcaccacggctgctgatctactacgcctccgagtcgatttccggaatcccggctcgcttttcggggtctggatcgggaacggacttcactctgaccatctcgtcgctggaacccgaggatttcgccgtgtactactgccaacagaacaacaattggccgaccacgttcggccagggcaccaagctcgagattaagggatcactggaagcggccgcaaccacaacacctgctccaaggccccccacacccgctccaactatagccagccaaccattgagcctcagacctgaagcttgcaggcccgcagcaggaggcgccgtccatacgcgaggcctggacttcgcgtgtgatatttatatttgggcccctttggccggaacatgtggggtgttgcttctctcccttgtgatcactctgtattgtaagcgcgggagaaagaagctcctgtacatcttcaagcagccttttatgcgacctgtgcaaaccactcaggaagaagatgggtgttcatgccgcttccccgaggaggaagaaggagggtgtgaactgagggtgaaattttctagaagcgccgatgctcccgcatatcagcagggtcagaatcagctctacaatgaattgaatctcggcaggcgagaagagtacgatgttctggacaagagacggggcagggatcccgagatggggggaaagccccggagaaaaaatcctcaggaggggttgtacaatgagctgcagaaggacaagatggctgaagcctatagcgagatcggaatgaaaggcgaaagacgcagaggcaaggggcatgacggtctgtaccagggtctctctacagccaccaaggacacttatgatgcgttgcatatgcaagccttgccaccccgctaaagcggccgcgtcgagtctagagggcccgtttaaacccgctgatcagcctcgactgtgccttctagttgccagccatctgttgtttgcccctcccccgtgccttccttgaccctggaaggtgccactcccactgtcctttcctaataaaatgaggaaattgcatcgcattgtctgagtaggtgtcattctattctggggggtggggtggggcaggacagcaagggggaggattgggaagacaatagcaggcatgctggggatgcggtgggctctatggatttggctacagcaacagggtggtggacctcatggcccacatggcctccaaggagtaagacccctggaccaccagccccagcaagagcacaagaggaagagagagaccctcactgctggggagtccctgccacactcagtcccccaccacactgaatctcccctcctcacagttgccatgtagaccccttgaagaggggaggggcctagggagccgcaccttgtcatgtaccatcaataaagtaccctgtgctcaaccagttacttgtcctgtcttattctagggtctggggcagaggggagggaagctgggcttgtgtcaaggtgagacattcttgctggggagggacctggtatgttctcctcagactgagggtagggcctccaaacagccttgcttgcttcgagaaccatttgcttcccgctcagacgtcttgagtgctacaggaagctggcaccactacttcagagaacaaggccttttcctctcctcgctccagt

SEQ ID NO: 208 - DNA, 3356 bp, synthetic construct
  source 1..3356: mol_type = other DNA
gaagactgtggatggcccctccgggaaactgtggcgtgatggccgcggggctctccagaacatcatccctgcctctactggcgctgccaaggctgtgggcaaggtcatccctgagctgaacgggaagctcactggcatggccttccgtgtccccactgccaacgtgtcagtggtggacctgacctgccgtctagaaaaacctgccaaatatgatgacatcaagaaggtggtgaagcaggcgtcggagggccccctcaagggcatcctgggctacactgagcaccaggtggtctcctctgacttcaacagcgacacccactcctccacctttgacgctggggctggcattgccctcaacgaccactttgtcaagctcatttcctggtatgtggctggggccagagactggctcttaaaaagtgcagggtctggcgccctctggtggctggctcagaaaaagggccctgacaactctttacatcttctaggtatgacaacgagttcggatatagcaatagagtggtcgatctgatggctcatatggctagcaaagagggaagcggagctactaacttcagcctgctgaagcaggctggagacgtggaggagaaccctggacctatggattggacctggatcctgtttctggtggccgctgccacaagagtgcacagcaattgggtcaacgtgatcagcgacctgaagaagatcgaggacctgatccagagcatgcacatcgacgccacactgtacaccgagtccgatgtgcaccctagctgcaaagtgaccgccatgaagtgctttctgctggaactgcaagtgatcagcctggaaagcggcgacgccagcatccacgataccgtggaaaacctgatcatcctggccaacaacagcctgagcagcaacggcaatgtgaccgagagcggctgcaaagagtgcgaggaactggaagagaagaacatcaaagagttcctccagagcttcgtccacatcgtgcagatgttcatcaacaccagcggaagcggagccacaaacttctctctgctgaagcaggcaggagatgttgaagaaaaccctggacctatcacctgtcctccacctatgagcgtggaacacgccgacatctgggtcaagagctacagcctgtacagcagagagcggtacatctgcaacagcggcttcaagagaaaggccggcacaagcagcctgaccgagtgtgtgctgaacaaggccacaaacgtggcccactggaccacacctagcctgaagtgcatcagagatcccgctctggttcatcagaggcctgcccctccatctacagtgacaacagctggcgtgacccctcagcctgagtctctgtctccatctggaaaagagcctgccgccagctctcccagctctaacaatactgctgccaccacagccgctatcgtgcctggatctcagctgatgcctagcaagagccctagcaccggcacaacagagatcagctctcacgagagcagccacggaacaccttctcagaccaccgccaagaattgggagctgacagcctctgcctctcatcagccacctggcgtgtacccacagggccactctgatacaacagtggccatcagcaccagcaccgttctgctgtgtggcctgtctgctgttagcctgctggcctgctacctgaagtctagacagacacctcctctggccagcgtggaaatggaagccatggaagctctgcctgtcacatggggcaccagcagcagagatgaggacctcgagaattgcagccaccacctgggaagcggagccacaaacttctctctgctgaagcaggcaggagatgttgaagaaaaccctggacctatggtgagcaagggcgaggagctgttcaccggggtggtgcccatcctggtcgagctggacggcgacgtaaacggccacaagttcagcgtgtccggcgagggcgagggcgatgccacctacggcaagctgaccctgaagttcatctgcaccaccggcaagctgcccgtgccctggcccaccctcgtgaccaccctgacctacggcgtgcagtgcttcagccgctaccccgaccacatgaagcagcacgacttcttcaagtccgccatgcccgaaggctacgtccaggagcgcaccatcttcttcaaggacgacggcaactacaagacccgcgccgaggtgaagttcgagggcgacaccctggtgaaccgcatcgagctgaagggcatcgacttcaaggaggacggcaacatcctggggcacaagctggagtacaactacaacagccacaacgtctatatcatggccgacaagcagaagaacggcatcaaggtgaacttcaagatccgccacaacatcgaggacggcagcgtgcagctcgccgaccactaccagcagaacacccccatcggcgacggccccgtgctgctgcccgacaaccactacctgagcacccagtccgccctgagcaaagaccccaacgagaagcgcgatcacatggtcctgctggagttcgtgaccgccgccgggatcactctcggcatggacgagctgtacaagtaagcggccgcgtcgagtctagagggcccgtttaaacccgctgatcagcctcgactgtgccttctagttgccagccatctgttgtttgcccctcccccgtgccttccttgaccctggaaggtgccactcccactgtcctttcctaataaaatgaggaaattgcatcgcattgtctgagtaggtgtcattctattctggggggtggggtggggcaggacagcaagggggaggattgggaagacaatagcaggcatgctggggatgcggtgggctctatggatttggctacagcaacagggtggtggacctcatggcccacatggcctccaaggagtaagacccctggaccaccagccccagcaagagcacaagaggaagagagagaccctcactgctggggagtccctgccacactcagtcccccaccacactgaatctcccctcctcacagttgccatgtagaccccttgaagaggggaggggcctagggagccgcaccttgtcatgtaccatcaataaagtaccctgtgctcaaccagttacttgtcctgtcttattctagggtctggggcagaggggagggaagctgggcttgtgtcaaggtgagacattcttgctggggagggacctggtatgttctcctcagactgagggtagggcctccaaacagccttgcttgcttcgagaaccatttgcttcccgctcagacgtcttgagtgctacaggaagctggcaccactacttcagagaacaaggccttttcctctcctcgctccagt

SEQ ID NO: 209 - DNA, 3401 bp, synthetic construct
  source 1..3401: mol_type = other DNA
gaagactgtggatggcccctccgggaaactgtggcgtgatggccgcggggctctccagaacatcatccctgcctctactggcgctgccaaggctgtgggcaaggtcatccctgagctgaacgggaagctcactggcatggccttccgtgtccccactgccaacgtgtcagtggtggacctgacctgccgtctagaaaaacctgccaaatatgatgacatcaagaaggtggtgaagcaggcgtcggagggccccctcaagggcatcctgggctacactgagcaccaggtggtctcctctgacttcaacagcgacacccactcctccacctttgacgctggggctggcattgccctcaacgaccactttgtcaagctcatttcctggtatgtggctggggccagagactggctcttaaaaagtgcagggtctggcgccctctggtggctggctcagaaaaagggccctgacaactctttacatcttctaggtatgacaacgagttcggatatagcaatagagtggtcgatctgatggctcatatggctagcaaagagggaagcggagctactaacttcagcctgctgaagcaggctggagacgtggaggagaaccctggacctatgtggcagctgttgctgccgacagccctcctgttgctggtctccgctggcatgagaaccgaggatctgcctaaggccgtggtgttcctggaacctcagtggtacagagtgctggaaaaggacagcgtgaccctgaagtgccagggcgcctattctcccgaggacaatagcacccagtggttccacaacgagagcctgatcagcagccaggccagcagctactttatcgatgccgccaccgtggacgacagcggcgagtacagatgccagaccaatctgagcaccctgagcgaccctgtgcagctggaagtgcacattggatggttgctgctgcaagcccctagatgggtgttcaaagaagaggaccccatccacctgagatgccactcttggaagaacacagccctgcacaaagtgacctacctgcagaacggcaagggcagaaagtacttccaccacaacagcgacttctacatccccaaggccacactgaaggactccggctcctacttctgcagaggcctggtcggcagcaagaacgtgtccagcgagacagtgaacatcaccatcacacagggcctcgccgtgtctaccatcagcagctttttcccacctggctatcaggtgtccttctgcctggtcatggtgctgctgttcgccgtggataccggcctgtacttcagcgtcaagaccaacatccggtccagcaccagagactggaaggaccacaagttcaagtggcggaaggaccctcaggacaagggaagcggagccacaaacttctctctgctgaagcaggcaggagatgttgaagaaaaccctggacctatggattggacctggatcctgtttctggtggccgctgccacaagagtgcacagcaattgggtcaacgtgatcagcgacctgaagaagatcgaggacctgatccagagcatgcacatcgacgccacactgtacaccgagtccgatgtgcaccctagctgcaaagtgaccgccatgaagtgctttctgctggaactgcaagtgatcagcctggaaagcggcgacgccagcatccacgataccgtggaaaacctgatcatcctggccaacaacagcctgagcagcaacggcaatgtgaccgagagcggctgcaaagagtgcgaggaactggaagagaagaacatcaaagagttcctccagagcttcgtccacatcgtgcagatgttcatcaacaccagcggaagcggagccacaaacttctctctgctgaagcaggcaggagatgttgaagaaaaccctggacctatcacctgtcctccacctatgagcgtggaacacgccgacatctgggtcaagagctacagcctgtacagcagagagcggtacatctgcaacagcggcttcaagagaaaggccggcacaagcagcctgaccgagtgtgtgctgaacaaggccacaaacgtggcccactggaccacacctagcctgaagtgcatcagagatcccgctctggttcatcagaggcctgcccctccatctacagtgacaacagctggcgtgacccctcagcctgagtctctgtctccatctggaaaagagcctgccgccagctctcccagctctaacaatactgctgccaccacagccgctatcgtgcctggatctcagctgatgcctagcaagagccctagcaccggcacaacagagatcagctctcacgagagcagccacggaacaccttctcagaccaccgccaagaattgggagctgacagcctctgcctctcatcagccacctggcgtgtacccacagggccactctgatacaacagtggccatcagcaccagcaccgttctgctgtgtggcctgtctgctgttagcctgctggcctgctacctgaagtctagacagacacctcctctggccagcgtggaaatggaagccatggaagctctgcctgtcacatggggcaccagcagcagagatgaggacctcgagaattgcagccaccacctgtaagcggccgcgtcgagtctagagggcccgtttaaacccgctgatcagcctcgactgtgccttctagttgccagccatctgttgtttgcccctcccccgtgccttccttgaccctggaaggtgccactcccactgtcctttcctaataaaatgaggaaattgcatcgcattgtctgagtaggtgtcattctattctggggggtggggtggggcaggacagcaagggggaggattgggaagacaatagcaggcatgctggggatgcggtgggctctatggatttggctacagcaacagggtggtggacctcatggcccacatggcctccaaggagtaagacccctggaccaccagccccagcaagagcacaagaggaagagagagaccctcactgctggggagtccctgccacactcagtcccccaccacactgaatctcccctcctcacagttgccatgtagaccccttgaagaggggaggggcctagggagccgcaccttgtcatgtaccatcaataaagtaccctgtgctcaaccagttacttgtcctgtcttattctagggtctggggcagaggggagggaagctgggcttgtgtcaaggtgagacattcttgctggggagggacctggtatgttctcctcagactgagggtagggcctccaaacagccttgcttgcttcgagaaccatttgcttcccgctcagacgtcttgagtgctacaggaagctggcaccactacttcagagaacaaggccttttcctctcctcgctccagt

SEQ ID NO: 210 - DNA, 3413 bp, synthetic construct
  source 1..3413: mol_type = other DNA
gaagactgtggatggcccctccgggaaactgtggcgtgatggccgcggggctctccagaacatcatccctgcctctactggcgctgccaaggctgtgggcaaggtcatccctgagctgaacgggaagctcactggcatggccttccgtgtccccactgccaacgtgtcagtggtggacctgacctgccgtctagaaaaacctgccaaatatgatgacatcaagaaggtggtgaagcaggcgtcggagggccccctcaagggcatcctgggctacactgagcaccaggtggtctcctctgacttcaacagcgacacccactcctccacctttgacgctggggctggcattgccctcaacgaccactttgtcaagctcatttcctggtatgtggctggggccagagactggctcttaaaaagtgcagggtctggcgccctctggtggctggctcagaaaaagggccctgacaactctttacatcttctaggtatgacaacgagttcggatatagcaatagagtggtcgatctgatggctcatatggctagcaaagagggaagcggagctactaacttcagcctgctgaagcaggctggagacgtggaggagaaccctggacctatggattggacctggatcctgtttctggtggccgctgccacaagagtgcacagcaattgggtcaacgtgatcagcgacctgaagaagatcgaggacctgatccagagcatgcacatcgacgccacactgtacaccgagtccgatgtgcaccctagctgcaaagtgaccgccatgaagtgctttctgctggaactgcaagtgatcagcctggaaagcggcgacgccagcatccacgataccgtggaaaacctgatcatcctggccaacaacagcctgagcagcaacggcaatgtgaccgagagcggctgcaaagagtgcgaggaactggaagagaagaacatcaaagagttcctccagagcttcgtccacatcgtgcagatgttcatcaacaccagctctggcggaggaagcggaggcggaggatctggtggtggtggatctggcggcggtggtagtggcggaggttctctgcaaatcacctgtcctccacctatgagcgtggaacacgccgacatctgggtcaagagctacagcctgtacagcagagagcggtacatctgcaacagcggcttcaagagaaaggccggcacaagcagcctgaccgagtgtgtgctgaacaaggccacaaacgtggcccactggaccacacctagcctgaagtgcatcagagatcccgctctggttcatcagaggcctgcccctccatctacagtgacaacagctggcgtgacccctcagcctgagtctctgtctccatctggaaaagagcctgccgccagctctcccagctctaacaatactgctgccaccacagccgctatcgtgcctggatctcagctgatgcctagcaagagccctagcaccggcacaacagagatcagctctcacgagagcagccacggaacaccttctcagaccaccgccaagaattgggagctgacagcctctgcctctcatcagccacctggcgtgtacccacagggccactctgatacaacagtggccatcagcaccagcaccgttctgctgtgtggcctgtctgctgttagcctgctggcctgctacctgaagtctagacagacacctcctctggccagcgtggaaatggaagccatggaagctctgcctgtcacatggggcaccagcagcagagatgaggacctcgagaattgcagccaccacctgggaagcggagccacaaacttctctctgctgaagcaggcaggagatgttgaagaaaaccctggacctatgtggcagctgttgctgccgacagccctcctgttgctggtctccgctggcatgagaaccgaggatctgcctaaggccgtggtgttcctggaacctcagtggtacagagtgctggaaaaggacagcgtgaccctgaagtgccagggcgcctattctcccgaggacaatagcacccagtggttccacaacgagagcctgatcagcagccaggccagcagctactttatcgatgccgccaccgtggacgacagcggcgagtacagatgccagaccaatctgagcaccctgagcgaccctgtgcagctggaagtgcacattggatggttgctgctgcaagcccctagatgggtgttcaaagaagaggaccccatccacctgagatgccactcttggaagaacacagccctgcacaaagtgacctacctgcagaacggcaagggcagaaagtacttccaccacaacagcgacttctacatccccaaggccacactgaaggactccggctcctacttctgcagaggcctggtcggcagcaagaacgtgtccagcgagacagtgaacatcaccatcacacagggcctcgccgtgtctaccatcagcagctttttcccacctggctatcaggtgtccttctgcctggtcatggtgctgctgttcgccgtggataccggcctgtacttcagcgtcaagaccaacatccggtccagcaccagagactggaaggaccacaagttcaagtggcggaaggaccctcaggacaagtaagcggccgcgtcgagtctagagggcccgtttaaacccgctgatcagcctcgactgtgccttctagttgccagccatctgttgtttgcccctcccccgtgccttccttgaccctggaaggtgccactcccactgtcctttcctaataaaatgaggaaattgcatcgcattgtctgagtaggtgtcattctattctggggggtggggtggggcaggacagcaagggggaggattgggaagacaatagcaggcatgctggggatgcggtgggctctatggatttggctacagcaacagggtggtggacctcatggcccacatggcctccaaggagtaagacccctggaccaccagccccagcaagagcacaagaggaagagagagaccctcactgctggggagtccctgccacactcagtcccccaccacactgaatctcccctcctcacagttgccatgtagaccccttgaagaggggaggggcctagggagccgcaccttgtcatgtaccatcaataaagtaccctgtgctcaaccagttacttgtcctgtcttattctagggtctggggcagaggggagggaagctgggcttgtgtcaaggtgagacattcttgctggggagggacctggtatgttctcctcagactgagggtagggcctccaaacagccttgcttgcttcgagaaccatttgcttcccgctcagacgtcttgagtgctacaggaagctggcaccactacttcagagaacaaggccttttcctctcctcgctccagt

SEQ ID NO: 211 - DNA, 3401 bp, synthetic construct
  source 1..3401: mol_type = other DNA
gaagactgtggatggcccctccgggaaactgtggcgtgatggccgcggggctctccagaacatcatccctgcctctactggcgctgccaaggctgtgggcaaggtcatccctgagctgaacgggaagctcactggcatggccttccgtgtccccactgccaacgtgtcagtggtggacctgacctgccgtctagaaaaacctgccaaatatgatgacatcaagaaggtggtgaagcaggcgtcggagggccccctcaagggcatcctgggctacactgagcaccaggtggtctcctctgacttcaacagcgacacccactcctccacctttgacgctggggctggcattgccctcaacgaccactttgtcaagctcatttcctggtatgtggctggggccagagactggctcttaaaaagtgcagggtctggcgccctctggtggctggctcagaaaaagggccctgacaactctttacatcttctaggtatgacaacgagttcggatatagcaatagagtggtcgatctgatggctcatatggctagcaaagagggaagcggagctactaacttcagcctgctgaagcaggctggagacgtggaggagaaccctggacctatggattggacctggatcctgtttctggtggccgctgccacaagagtgcacagcaattgggtcaacgtgatcagcgacctgaagaagatcgaggacctgatccagagcatgcacatcgacgccacactgtacaccgagtccgatgtgcaccctagctgcaaagtgaccgccatgaagtgctttctgctggaactgcaagtgatcagcctggaaagcggcgacgccagcatccacgataccgtggaaaacctgatcatcctggccaacaacagcctgagcagcaacggcaatgtgaccgagagcggctgcaaagagtgcgaggaactggaagagaagaacatcaaagagttcctccagagcttcgtccacatcgtgcagatgttcatcaacaccagcggaagcggagccacaaacttctctctgctgaagcaggcaggagatgttgaagaaaaccctggacctatcacctgtcctccacctatgagcgtggaacacgccgacatctgggtcaagagctacagcctgtacagcagagagcggtacatctgcaacagcggcttcaagagaaaggccggcacaagcagcctgaccgagtgtgtgctgaacaaggccacaaacgtggcccactggaccacacctagcctgaagtgcatcagagatcccgctctggttcatcagaggcctgcccctccatctacagtgacaacagctggcgtgacccctcagcctgagtctctgtctccatctggaaaagagcctgccgccagctctcccagctctaacaatactgctgccaccacagccgctatcgtgcctggatctcagctgatgcctagcaagagccctagcaccggcacaacagagatcagctctcacgagagcagccacggaacaccttctcagaccaccgccaagaattgggagctgacagcctctgcctctcatcagccacctggcgtgtacccacagggccactctgatacaacagtggccatcagcaccagcaccgttctgctgtgtggcctgtctgctgttagcctgctggcctgctacctgaagtctagacagacacctcctctggccagcgtggaaatggaagccatggaagctctgcctgtcacatggggcaccagcagcagagatgaggacctcgagaattgcagccaccacctgggaagcggagccacaaacttctctctgctgaagcaggcaggagatgttgaagaaaaccctggacctatgtggcagctgttgctgccgacagccctcctgttgctggtctccgctggcatgagaaccgaggatctgcctaaggccgtggtgttcctggaacctcagtggtacagagtgctggaaaaggacagcgtgaccctgaagtgccagggcgcctattctcccgaggacaatagcacccagtggttccacaacgagagcctgatcagcagccaggccagcagctactttatcgatgccgccaccgtggacgacagcggcgagtacagatgccagaccaatctgagcaccctgagcgaccctgtgcagctggaagtgcacattggatggttgctgctgcaagcccctagatgggtgttcaaagaagaggaccccatccacctgagatgccactcttggaagaacacagccctgcacaaagtgacctacctgcagaacggcaagggcagaaagtacttccaccacaacagcgacttctacatccccaaggccacactgaaggactccggctcctacttctgcagaggcctggtcggcagcaagaacgtgtccagcgagacagtgaacatcaccatcacacagggcctcgccgtgtctaccatcagcagctttttcccacctggctatcaggtgtccttctgcctggtcatggtgctgctgttcgccgtggataccggcctgtacttcagcgtcaagaccaacatccggtccagcaccagagactggaaggaccacaagttcaagtggcggaaggaccctcaggacaagtaagcggccgcgtcgagtctagagggcccgtttaaacccgctgatcagcctcgactgtgccttctagttgccagccatctgttgtttgcccctcccccgtgccttccttgaccctggaaggtgccactcccactgtcctttcctaataaaatgaggaaattgcatcgcattgtctgagtaggtgtcattctattctggggggtggggtggggcaggacagcaagggggaggattgggaagacaatagcaggcatgctggggatgcggtgggctctatggatttggctacagcaacagggtggtggacctcatggcccacatggcctccaaggagtaagacccctggaccaccagccccagcaagagcacaagaggaagagagagaccctcactgctggggagtccctgccacactcagtcccccaccacactgaatctcccctcctcacagttgccatgtagaccccttgaagaggggaggggcctagggagccgcaccttgtcatgtaccatcaataaagtaccctgtgctcaaccagttacttgtcctgtcttattctagggtctggggcagaggggagggaagctgggcttgtgtcaaggtgagacattcttgctggggagggacctggtatgttctcctcagactgagggtagggcctccaaacagccttgcttgcttcgagaaccatttgcttcccgctcagacgtcttgagtgctacaggaagctggcaccactacttcagagaacaaggccttttcctctcctcgctccagt

SEQ ID NO: 212 - DNA, 3413 bp, synthetic construct
  source 1..3413: mol_type = other DNA
gaagactgtggatggcccctccgggaaactgtggcgtgatggccgcggggctctccagaacatcatccctgcctctactggcgctgccaaggctgtgggcaaggtcatccctgagctgaacgggaagctcactggcatggccttccgtgtccccactgccaacgtgtcagtggtggacctgacctgccgtctagaaaaacctgccaaatatgatgacatcaagaaggtggtgaagcaggcgtcggagggccccctcaagggcatcctgggctacactgagcaccaggtggtctcctctgacttcaacagcgacacccactcctccacctttgacgctggggctggcattgccctcaacgaccactttgtcaagctcatttcctggtatgtggctggggccagagactggctcttaaaaagtgcagggtctggcgccctctggtggctggctcagaaaaagggccctgacaactctttacatcttctaggtatgacaacgagttcggatatagcaatagagtggtcgatctgatggctcatatggctagcaaagagggaagcggagctactaacttcagcctgctgaagcaggctggagacgtggaggagaaccctggacctatgtggcagctgttgctgccgacagccctcctgttgctggtctccgctggcatgagaaccgaggatctgcctaaggccgtggtgttcctggaacctcagtggtacagagtgctggaaaaggacagcgtgaccctgaagtgccagggcgcctattctcccgaggacaatagcacccagtggttccacaacgagagcctgatcagcagccaggccagcagctactttatcgatgccgccaccgtggacgacagcggcgagtacagatgccagaccaatctgagcaccctgagcgaccctgtgcagctggaagtgcacattggatggttgctgctgcaagcccctagatgggtgttcaaagaagaggaccccatccacctgagatgccactcttggaagaacacagccctgcacaaagtgacctacctgcagaacggcaagggcagaaagtacttccaccacaacagcgacttctacatccccaaggccacactgaaggactccggctcctacttctgcagaggcctggtcggcagcaagaacgtgtccagcgagacagtgaacatcaccatcacacagggcctcgccgtgtctaccatcagcagctttttcccacctggctatcaggtgtccttctgcctggtcatggtgctgctgttcgccgtggataccggcctgtacttcagcgtcaagaccaacatccggtccagcaccagagactggaaggaccacaagttcaagtggcggaaggaccctcaggacaagggaagcggagccacaaacttctctctgctgaagcaggcaggagatgttgaagaaaaccctggacctatggattggacctggatcctgtttctggtggccgctgccacaagagtgcacagcaattgggtcaacgtgatcagcgacctgaagaagatcgaggacctgatccagagcatgcacatcgacgccacactgtacaccgagtccgatgtgcaccctagctgcaaagtgaccgccatgaagtgctttctgctggaactgcaagtgatcagcctggaaagcggcgacgccagcatccacgataccgtggaaaacctgatcatcctggccaacaacagcctgagcagcaacggcaatgtgaccgagagcggctgcaaagagtgcgaggaactggaagagaagaacatcaaagagttcctccagagcttcgtccacatcgtgcagatgttcatcaacaccagctctggcggaggaagcggaggcggaggatctggtggtggtggatctggcggcggtggtagtggcggaggttctctgcaaatcacctgtcctccacctatgagcgtggaacacgccgacatctgggtcaagagctacagcctgtacagcagagagcggtacatctgcaacagcggcttcaagagaaaggccggcacaagcagcctgaccgagtgtgtgctgaacaaggccacaaacgtggcccactggaccacacctagcctgaagtgcatcagagatcccgctctggttcatcagaggcctgcccctccatctacagtgacaacagctggcgtgacccctcagcctgagtctctgtctccatctggaaaagagcctgccgccagctctcccagctctaacaatactgctgccaccacagccgctatcgtgcctggatctcagctgatgcctagcaagagccctagcaccggcacaacagagatcagctctcacgagagcagccacggaacaccttctcagaccaccgccaagaattgggagctgacagcctctgcctctcatcagccacctggcgtgtacccacagggccactctgatacaacagtggccatcagcaccagcaccgttctgctgtgtggcctgtctgctgttagcctgctggcctgctacctgaagtctagacagacacctcctctggccagcgtggaaatggaagccatggaagctctgcctgtcacatggggcaccagcagcagagatgaggacctcgagaattgcagccaccacctgtaagcggccgcgtcgagtctagagggcccgtttaaacccgctgatcagcctcgactgtgccttctagttgccagccatctgttgtttgcccctcccccgtgccttccttgaccctggaaggtgccactcccactgtcctttcctaataaaatgaggaaattgcatcgcattgtctgagtaggtgtcattctattctggggggtggggtggggcaggacagcaagggggaggattgggaagacaatagcaggcatgctggggatgcggtgggctctatggatttggctacagcaacagggtggtggacctcatggcccacatggcctccaaggagtaagacccctggaccaccagccccagcaagagcacaagaggaagagagagaccctcactgctggggagtccctgccacactcagtcccccaccacactgaatctcccctcctcacagttgccatgtagaccccttgaagaggggaggggcctagggagccgcaccttgtcatgtaccatcaataaagtaccctgtgctcaaccagttacttgtcctgtcttattctagggtctggggcagaggggagggaagctgggcttgtgtcaaggtgagacattcttgctggggagggacctggtatgttctcctcagactgagggtagggcctccaaacagccttgcttgcttcgagaaccatttgcttcccgctcagacgtcttgagtgctacaggaagctggcaccactacttcagagaacaaggccttttcctctcctcgctccagt

SEQ ID NO: 213 - DNA, 3413 bp, synthetic construct; identical to SEQ ID NO: 212
  source 1..3413: mol_type = other DNA

SEQ ID NO: 214 - DNA, 2174 bp, synthetic construct
  source 1..2174: mol_type = other DNA
gaagactgtggatggcccctccgggaaactgtggcgtgatggccgcggggctctccagaacatcatccctgcctctactggcgctgccaaggctgtgggcaaggtcatccctgagctgaacgggaagctcactggcatggccttccgtgtccccactgccaacgtgtcagtggtggacctgacctgccgtctagaaaaacctgccaaatatgatgacatcaagaaggtggtgaagcaggcgtcggagggccccctcaagggcatcctgggctacactgagcaccaggtggtctcctctgacttcaacagcgacacccactcctccacctttgacgctggggctggcattgccctcaacgaccactttgtcaagctcatttcctggtatgtggctggggccagagactggctcttaaaaagtgcagggtctggcgccctctggtggctggctcagaaaaagggccctgacaactctttacatcttctaggtatgacaacgagttcggatatagcaatagagtggtcgatctgatggctcatatggctagcaaagagggaagcggagctactaacttcagcctgctgaagcaggctggagacgtggaggagaaccctggacctatgtcaaatattacagatccacagatgtgggattttgatgatctaaatttcactggcatgccacctgcagatgaagattacagcccctgtatgctagaaactgagacactcaacaagtatgttgtgatcatcgcctatgccctagtgttcctgctgagcctgctgggaaactccctggtgatgctggtcatcttatacagcagggtcggccgctccgtcactgatgtctacctgctgaacctggccttggccgacctactctttgccctgaccttgcccatctgggccgcctccaaggtgaatggctggatttttggcacattcctgtgcaaggtggtctcactcctgaaggaagtcaacttctacagtggcatcctgctgttggcctgcatcagtgtggaccgttacctggccattgtccatgccacacgcacactgacccagaagcgtcacttggtcaagtttgtttgtcttggctgctggggactgtctatgaatctgtccctgcccttcttccttttccgccaggcttaccatccaaacaattccagtccagtttgctatgaggtcctgggaaatgacacagcaaaatggcggatggtgttgcggatcctgcctcacacctttggcttcatcgtgccgctgtttgtcatgctgttctgctatggattcaccctgcgtacactgtttaaggcccacatggggcagaagcaccgagccatgagggtcatctttgctgtcgtcctcatcttcctgctttgctggctgccctacaacctggtcctgctggcagacaccctcatgaggacccaggtgatccaggagagctgtgagcgccgcaacaacatcggccgggccctggatgccactgagattctgggatttctccatagctgcctcaaccccatcatctacgccttcatcggccaaaattttcgccatggattcctcaagatcctggctatgcatggcctggtcagcaaggagttcttggcacgtcatcgtgttacctcctacacttcttcgtctgtcaatgtctcttccaacctctgaatttggctacagcaacagggtggtggacctcatggcccacatggcctccaaggagtaagacccctggaccaccagccccagcaagagcacaagaggaagagagagaccctcactgctggggagtccctgccacactcagtcccccaccacactgaatctcccctcctcacagttgccatgtagaccccttgaagaggggaggggcctagggagccgcaccttgtcatgtaccatcaataaagtaccctgtgctcaaccagttacttgtcctgtcttattctagggtctggggcagaggggagggaagctgggcttgtgtcaaggtgagacattcttgctggggagggacctggtatgttctcctcagactgagggtagggcctccaaacagccttgcttgcttcgagaaccatttgcttcccgctcagacgtcttgagtgctacaggaagctggcaccactacttcagagaacaaggccttttcctctcctcgctccagt

SEQ ID NO: 215 - DNA, 2369 bp, synthetic construct
  source 1..2369: mol_type = other DNA
gaagactgtggatggcccctccgggaaactgtggcgtgatggccgcggggctctccagaacatcatccctgcctctactggcgctgccaaggctgtgggcaaggtcatccctgagctgaacgggaagctcactggcatggccttccgtgtccccactgccaacgtgtcagtggtggacctgacctgccgtctagaaaaacctgccaaatatgatgacatcaagaaggtggtgaagcaggcgtcggagggccccctcaagggcatcctgggctacactgagcaccaggtggtctcctctgacttcaacagcgacacccactcctccacctttgacgctggggctggcattgccctcaacgaccactttgtcaagctcatttcctggtatgtggctggggccagagactggctcttaaaaagtgcagggtctggcgccctctggtggctggctcagaaaaagggccctgacaactctttacatcttctaggtatgacaacgagttcggatatagcaatagagtggtcgatctgatggctcatatggctagcaaagagggaagcggagctactaacttcagcctgctgaagcaggctggagacgtggaggagaaccctggacctatggagttgaggaagtacggccctggaagactggcggggacagttataggaggagctgctcagagtaaatcacagactaaatcagactcaatcacaaaagagttcctgccaggcctttacacagccccttcctccccgttcccgccctcacaggtgagtgaccaccaagtgctaaatgacgccgaggttgccgccctcctggagaacttcagctcttcctatgactatggagaaaacgagagtgactcgtgctgtacctccccgccctgcccacaggacttcagcctgaacttcgaccgggccttcctgccagccctctacagcctcctctttctgctggggctgctgggcaacggcgcggtggcagccgtgctgctgagccggcggacagccctgagcagcaccgacaccttcctgctccacctagctgtagcagacacgctgctggtgctgacactgccgctctgggcagtggacgctgccgtccagtgggtctttggctctggcctctgcaaagtggcaggtgccctcttcaacatcaacttctacgcaggagccctcctgctggcctgcatcagctttgaccgctacctgaacatagttcatgccacccagctctaccgccgggggcccccggcccgcgtgaccctcacctgcctggctgtctgggggctctgcctgcttttcgccctcccagacttcatcttcctgtcggcccaccacgacgagcgcctcaacgccacccactgccaatacaacttcccacaggtgggccgcacggctctgcgggtgctgcagctggtggctggctttctgctgcccctgctggtcatggcctactgctatgcccacatcctggccgtgctgctggtttccaggggccagcggcgcctgcgggccatgcggctggtggtggtggtcgtggtggcctttgccctctgctggaccccctatcacctggtggtgctggtggacatcctcatggacctgggcgctttggcccgcaactgtggccgagaaagcagggtagacgtggccaagtcggtcacctcaggcctgggctacatgcactgctgcctcaacccgctgctctatgcctttgtaggggtcaagttccgggagcggatgtggatgctgctcttgcgcctgggctgccccaaccagagagggctccagaggcagccatcgtcttcccgccgggattcatcctggtctgagacctcagaggcctcctactcgggcttgtgaatttggctacagcaacagggtggtggacctcatggcccacatggcctccaaggagtaagacccctggaccaccagccccagcaagagcacaagaggaagagagagaccctcactgctggggagtccctgccacactcagtcccccaccacactgaatctcccctcctcacagttgccatgtagaccccttgaagaggggaggggcctagggagccgcaccttgtcatgtaccatcaataaagtaccctgtgctcaaccagttacttgtcctgtcttattctagggtctggggcagaggggagggaagctgggcttgtgtcaaggtgagacattcttgctggggagggacctggtatgttctcctcagactgagggtagggcctccaaacagccttgcttgcttcgagaaccatttgcttcccgctcagacgtcttgagtgctacaggaagctggcaccactacttcagagaacaaggccttttcctctcctcgctccagt

SEQ ID NO: 216 - DNA, 2228 bp, synthetic construct
  source 1..2228: mol_type = other DNA
gaagactgtggatggcccctccgggaaactgtggcgtgatggccgcggggctctccagaacatcatccctgcctctactggcgctgccaaggctgtgggcaaggtcatccctgagctgaacgggaagctcactggcatggccttccgtgtccccactgccaacgtgtcagtggtggacctgacctgccgtctagaaaaacctgccaaatatgatgacatcaagaaggtggtgaagcaggcgtcggagggccccctcaagggcatcctgggctacactgagcaccaggtggtctcctctgacttcaacagcgacacccactcctccacctttgacgctggggctggcattgccctcaacgaccactttgtcaagctcatttcctggtatgtggctggggccagagactggctcttaaaaagtgcagggtctggcgccctctggtggctggctcagaaaaagggccctgacaactctttacatcttctaggtatgacaacgagttcggatatagcaatagagtggtcgatctgatggctcatatggctagcaaagagggaagcggagctactaacttcagcctgctgaagcaggctggagacgtggaggagaaccctggacctatggtccttgaggtgagtgaccaccaagtgctaaatgacgccgaggttgccgccctcctggagaacttcagctcttcctatgactatggagaaaacgagagtgactcgtgctgtacctccccgccctgcccacaggacttcagcctgaacttcgaccgggccttcctgccagccctctacagcctcctctttctgctggggctgctgggcaacggcgcggtggcagccgtgctgctgagccggcggacagccctgagcagcaccgacaccttcctgctccacctagctgtagcagacacgctgctggtgctgacactgccgctctgggcagtggacgctgccgtccagtgggtctttggctctggcctctgcaaagtggcaggtgccctcttcaacatcaacttctacgcaggagccctcctgctggcctgcatcagctttgaccgctacctgaacatagttcatgccacccagctctaccgccgggggcccccggcccgcgtgaccctcacctgcctggctgtctgggggctctgcctgcttttcgccctcccagacttcatcttcctgtcggcccaccacgacgagcgcctcaacgccacccactgccaatacaacttcccacaggtgggccgcacggctctgcgggtgctgcagctggtggctggctttctgctgcccctgctggtcatggcctactgctatgcccacatcctggccgtgctgctggtttccaggggccagcggcgcctgcgggccatgcggctggtggtggtggtcgtggtggcctttgccctctgctggaccccctatcacctggtggtgctggtggacatcctcatggacctgggcgctttggcccgcaactgtggccgagaaagcagggtagacgtggccaagtcggtcacctcaggcctgggctacatgcactgctgcctcaacccgctgctctatgcctttgtaggggtcaagttccgggagcggatgtggatgctgctcttgcgcctgggctgccccaaccagagagggctccagaggcagccatcgtcttcccgccgggattcatcctggtctgagacctcagaggcctcctactcgggcttgtgaatttggctacagcaacagggtggtggacctcatggcccacatggcctccaaggagtaagacccctggaccaccagccccagcaagagcacaagaggaagagagagaccctcactgctggggagtccctgccacactcagtcccccaccacactgaatctcccctcctcacagttgccatgtagaccccttgaagaggggaggggcctagggagccgcaccttgtcatgtaccatcaataaagtaccctgtgctcaaccagttacttgtcctgtcttattctagggtctggggcagaggggagggaagctgggcttgtgtcaaggtgagacattcttgctggggagggacctggtatgttctcctcagactgagggtagggcctccaaacagccttgcttgcttcgagaaccatttgcttcccgctcagacgtcttgagtgctacaggaagctggcaccactacttcagagaacaaggccttttcctctcctcgctccagt

SEQ ID NO: 217 - DNA, 2180 bp, synthetic construct
  source 1..2180: mol_type = other DNA
gaagactgtggatggcccctccgggaaactgtggcgtgatggccgcggggctctccagaacatcatccctgcctctactggcgctgccaaggctgtgggcaaggtcatccctgagctgaacgggaagctcactggcatggccttccgtgtccccactgccaacgtgtcagtggtggacctgacctgccgtctagaaaaacctgccaaatatgatgacatcaagaaggtggtgaagcaggcgtcggagggccccctcaagggcatcctgggctacactgagcaccaggtggtctcctctgacttcaacagcgacacccactcctccacctttgacgctggggctggcattgccctcaacgaccactttgtcaagctcatttcctggtatgtggctggggccagagactggctcttaaaaagtgcagggtctggcgccctctggtggctggctcagaaaaagggccctgacaactctttacatcttctaggtatgacaacgagttcggatatagcaatagagtggtcgatctgatggctcatatggctagcaaagagggaagcggagctactaacttcagcctgctgaagcaggctggagacgtggaggagaaccctggacctatggattatcaagtgtcaagtccaatctatgacatcaattattatacatcggagccctgccaaaaaatcaatgtgaagcaaatcgcagcccgcctcctgcctccgctctactcactggtgttcatctttggttttgtgggcaacatgctggtcatcctcatcctgataaactgcaaaaggctgaagagcatgactgacatctacctgctcaacctggccatctctgacctgtttttccttcttactgtccccttctgggctcactatgctgccgcccagtgggactttggaaatacaatgtgtcaactcttgacagggctctattttataggcttcttctctggaatcttcttcatcatcctcctgacaatcgataggtacctggctgtcgtccatgctgtgtttgctttaaaagccaggacggtcacctttggggtggtgacaagtgtgatcacttgggtggtggctgtgtttgcgtctctcccaggaatcatctttaccagatctcaaaaagaaggtcttcattacacctgcagctctcattttccatacagtcagtatcaattctggaagaatttccagacattaaagatagtcatcttggggctggtcctgccgctgcttgtcatggtcatctgctactcgggaatcctaaaaactctgcttcggtgtcgaaatgagaagaagaggcacagggctgtgaggcttatcttcaccatcatgattgtttattttctcttctgggctccctacaacattgtccttctcctgaacaccttccaggaattctttggcctgaataattgcagtagctctaacaggttggaccaagctatgcaggtgacagagactcttgggatgacgcactgctgcatcaaccccatcatctatgcctttgtcggggagaagttcagaaactacctcttagtcttcttccaaaagcacattgccaaacgcttctgcaaatgctgttctattttccagcaagaggctcccgagcgagcaagctcagtttacacccgatccactggggagcaggaaatatctgtgggcttgtgaatttggctacagcaacagggtggtggacctcatggcccacatggcctccaaggagtaagacccctggaccaccagccccagcaagagcacaagaggaagagagagaccctcactgctggggagtccctgccacactcagtcccccaccacactgaatctcccctcctcacagttgccatgtagaccccttgaagaggggaggggcctagggagccgcaccttgtcatgtaccatcaataaagtaccctgtgctcaaccagttacttgtcctgtcttattctagggtctggggcagaggggagggaagctgggcttgtgtcaaggtgagacattcttgctggggagggacctggtatgttctcctcagactgagggtagggcctccaaacagccttgcttgcttcgagaaccatttgcttcccgctcagacgtcttgagtgctacaggaagctggcaccactacttcagagaacaaggccttttcctctcctcgctccagt

SEQ ID NO: 218 - DNA, 2246 bp, synthetic construct
  source 1..2246: mol_type = other DNA
gaagactgtggatggcccctccgggaaactgtggcgtgatggccgcggggctctccagaacatcatccctgcctctactggcgctgccaaggctgtgggcaaggtcatccctgagctgaacgggaagctcactggcatggccttccgtgtccccactgccaacgtgtcagtggtggacctgacctgccgtctagaaaaacctgccaaatatgatgacatcaagaaggtggtgaagcaggcgtcggagggccccctcaagggcatcctgggctacactgagcaccaggtggtctcctctgacttcaacagcgacacccactcctccacctttgacgctggggctggcattgccctcaacgaccactttgtcaagctcatttcctggtatgtggctggggccagagactggctcttaaaaagtgcagggtctggcgccctctggtggctggctcagaaaaagggccctgacaactctttacatcttctaggtatgacaacgagttcggatatagcaatagagtggtcgatctgatggctcatatggctagcaaagagggaagcggagctactaacttcagcctgctgaagcaggctggagacgtggaggagaaccctggacctatgctgtccacatctcgttctcggtttatcagaaataccaacgagagcggtgaagaagtcaccaccttttttgattatgattacggtgctccctgtcataaatttgacgtgaagcaaattggggcccaactcctgcctccgctctactcgctggtgttcatctttggttttgtgggcaacatgctggtcgtcctcatcttaataaactgcaaaaagctgaagtgcttgactgacatttacctgctcaacctggccatctctgatctgctttttcttattactctcccattgtgggctcactctgctgcaaatgagtgggtctttgggaatgcaatgtgcaaattattcacagggctgtatcacatcggttattttggcggaatcttcttcatcatcctcctgacaatcgatagatacctggctattgtccatgctgtgtttgctttaaaagccaggacggtcacctttggggtggtgacaagtgtgatcacctggttggtggctgtgtttgcttctgtcccaggaatcatctttactaaatgccagaaagaagattctgtttatgtctgtggcccttattttccacgaggatggaataatttccacacaataatgaggaacattttggggctggtcctgccgctgctcatcatggtcatctgctactcgggaatcctgaaaaccctgcttcggtgtcgaaacgagaagaagaggcatagggcagtgagagtcatcttcaccatcatgattgtttactttctcttctggactccctataatattgtcattctcctgaacaccttccaggaattcttcggcctgagtaactgtgaaagcaccagtcaactggaccaagccacgcaggtgacagagactcttgggatgactcactgctgcatcaatcccatcatctatgccttcgttggggagaagttcagaagcctttttcacatagctcttggctgtaggattgccccactccaaaaaccagtgtgtggaggtccaggagtgagaccaggaaagaatgtgaaagtgactacacaaggactcctcgatggtcgtggaaaaggaaagtcaattggcagagcccctgaagccagtcttcaggacaaagaaggagcctagatttggctacagcaacagggtggtggacctcatggcccacatggcctccaaggagtaagacccctggaccaccagccccagcaagagcacaagaggaagagagagaccctcactgctggggagtccctgccacactcagtcccccaccacactgaatctcccctcctcacagttgccatgtagaccccttgaagaggggaggggcctagggagccgcaccttgtcatgtaccatcaataaagtaccctgtgctcaaccagttacttgtcctgtcttattctagggtctggggcagaggggagggaagctgggcttgtgtcaaggtgagacattcttgctggggagggacctggtatgttctcctcagactgagggtagggcctccaaacagccttgcttgcttcgagaaccatttgcttcccgctcagacgtcttgagtgctacaggaagctggcaccactacttcagagaacaaggccttttcctctcctcgctccagt

SEQ ID NO: 219 - DNA, 21 bp, synthetic construct
  source 1..21: mol_type = other DNA
agacagagtagggtccagacg

SEQ ID NO: 220 - DNA, 21 bp, synthetic construct
  source 1..21: mol_type = other DNA
caggatttctggttgtcacag

SEQ ID NO: 221 - DNA, 21 bp, synthetic construct
  source 1..21: mol_type = other DNA
ctcctgtaggttgcccttggc

SEQ ID NO: 222 - DNA, 21 bp, synthetic construct
  source 1..21: mol_type = other DNA
acagagtagggtccagacgca

SEQ ID NO: 223 - DNA, 21 bp, synthetic construct
  source 1..21: mol_type = other DNA
gcttctccaaagtgcattatg

SEQ ID NO: 224 - DNA, 21 bp, synthetic construct
  source 1..21: mol_type = other DNA
gcagcagaagctgagttcaac

SEQ ID NO: 225 - DNA, 21 bp, synthetic construct
  source 1..21: mol_type = other DNA
tgaggagcggaagacggagtt

SEQ ID NO: 226 - DNA, 21 bp, synthetic construct
  source 1..21: mol_type = other DNA
ctttggagaagcagcatcttc

SEQ ID NO: 227 - DNA, 21 bp, synthetic construct
  source 1..21: mol_type = other DNA
ctcccctaccatgactttatt

SEQ ID NO: 228 - DNA, 21 bp, synthetic construct
  source 1..21: mol_type = other DNA
gacagagtagggtccagacgc

SEQ ID NO: 229 - DNA, 21 bp, synthetic construct
  source 1..21: mol_type = other DNA
ctgaggagcggaagacggagt

SEQ ID NO: 230 - DNA, 21 bp, synthetic construct
  source 1..21: mol_type = other DNA
gggcatcttgggcctcccaca

SEQ ID NO: 231 - DNA, 21 bp, synthetic construct
  source 1..21: mol_type = other DNA
ccaagaggcatactcctcata

SEQ ID NO: 232 - DNA, 21 bp, synthetic construct
  source 1..21: mol_type = other DNA
agaatgacgagaacataacac

SEQ ID NO: 233 - DNA, 21 bp, synthetic construct
  source 1..21: mol_type = other DNA
cctgacgcggcatgtcatcag

SEQ ID NO: 234 - DNA, 21 bp, synthetic construct
  source 1..21: mol_type = other DNA
agcgagcactgtgccatcatc

SEQ ID NO: 235 - DNA, 21 bp, synthetic construct
  source 1..21: mol_type = other DNA
gcaggttaggtcgttcttcac

SEQ ID NO: 236 - DNA, 21 bp, synthetic construct
  source 1..21: mol_type = other DNA
acctccatctgtgagaagcca

SEQ ID NO: 237 - DNA, 21 bp, synthetic construct
  source 1..21: mol_type = other DNA
taaagtcatggtaggggagct

SEQ ID NO: 238 - DNA, 21 bp, synthetic construct
  source 1..21: mol_type = other DNA
tcagagctacaggaacacatg

SEQ ID NO: 239 - DNA, 21 bp, synthetic construct
  source 1..21: mol_type = other DNA
tctcagacatcaatctgaagc

SEQ ID NO: 240 - DNA, 21 bp, synthetic construct
  source 1..21: mol_type = other DNA
catcagcctcctgccaccact

SEQ ID NO: 241 - DNA, 21 bp, synthetic construct
  source 1..21: mol_type = other DNA
cgctcctcagccgtcaggaac

SEQ ID NO: 242 - DNA, 21 bp, synthetic construct
  source 1..21: mol_type = other DNA
aacctgggaaaccggcaagac

SEQ ID NO: 243 - DNA, 21 bp, synthetic construct
  source 1..21: mol_type = other DNA
tccacgccaagggcaacctac

SEQ ID NO: 244 - DNA, 21 bp, synthetic construct
  source 1..21: mol_type = other DNA
gaggtgagcaatcccccgggc

SEQ ID NO: 245 - DNA, 21 bp, synthetic construct
  source 1..21: mol_type = other DNA
cagcagaagctgagttcaacc

SEQ ID NO: 246 - DNA, 21 bp, synthetic construct
  source 1..21: mol_type = other DNA
tccaagaggcatactcctcat

SEQ ID NO: 247 - DNA, 21 bp, synthetic construct
  source 1..21: mol_type = other DNA
agcagaagctgagttcaacct

SEQ ID NO: 248 - DNA, 21 bp, synthetic construct
  source 1..21: mol_type = other DNA
ccagttcctgacggctgagga

SEQ ID NO: 249 - DNA, 21 bp, synthetic construct
  source 1..21: mol_type = other DNA
aggagtatgcctcttggaaga

SEQ ID NO: 250 - DNA, 21 bp, synthetic construct
  source 1..21: mol_type = other DNA
ttccaagaggcatactcctca

SEQ ID NO: 251 - DNA, 21 bp, synthetic construct
  source 1..21: mol_type = other DNA
caactgtgtaaattttgtgat

SEQ ID NO: 252 - DNA, 21 bp, synthetic construct
  source 1..21: mol_type = other DNA
tgaaggaaaaaaaaaagcctg

SEQ ID NO: 253 - DNA, 21 bp, synthetic construct
  source 1..21: mol_type = other DNA
cgtcttccgctcctcagccgt

SEQ ID NO: 254 - DNA, 21 bp, synthetic construct
  source 1..21: mol_type = other DNA
ccaggtcatccacagacagag

SEQ ID NO: 255 - DNA, 21 bp, synthetic construct
  source 1..21: mol_type = other DNA
gcctagagtgaagagattcat

SEQ ID NO: 256 - DNA, 21 bp, synthetic construct
  source 1..21: mol_type = other DNA
gttctccaaagtgcattatga

SEQ ID NO: 257 - DNA, 21 bp, synthetic construct
  source 1..21: mol_type = other DNA
gcatcttccagaataaagtca

SEQ ID NO: 258 - DNA, 20 bp, synthetic construct
  source 1..20: mol_type = other DNA
caaccgtctggtggccgacg

SEQ ID NO: 259 - DNA, 20 bp, synthetic construct
  source 1..20: mol_type = other DNA
caggatcggggctgtcgctt

SEQ ID NO: 260 - DNA, 20 bp, synthetic construct
  source 1..20: mol_type = other DNA
tcgggcctcgctggccgtaa

SEQ ID NO: 261 - DNA, 20 bp, synthetic construct
  source 1..20: mol_type = other DNA
gaggtagtcggccatgcgcc

SEQ ID NO: 262 - DNA, 20 bp, synthetic construct
  source 1..20: mol_type = other DNA
caggtgttgtcgggcctcgc

SEQ ID NO: 263 - DNA, 20 bp, synthetic construct
  source 1..20: mol_type = other DNA
ggaggtagtcggccatgcgc

SEQ ID NO: 264 - DNA, 20 bp, synthetic construct
  source 1..20: mol_type = other DNA
ggcatactcaatgcgtacat

SEQ ID NO: 265 - DNA, 20 bp, synthetic construct
  source 1..20: mol_type = other DNA
ccgccttgtcatcaaccgtc

SEQ ID NO: 266 - DNA, 20 bp, synthetic construct
  source 1..20: mol_type = other DNA
aggatcggggctgtcgcttc

SEQ ID NO: 267 - DNA, 20 bp, synthetic construct
  source 1..20: mol_type = other DNA
ccttgtcatcaaccgtctgg

SEQ ID NO: 268 - DNA, 20 bp, synthetic construct
  source 1..20: mol_type = other DNA
tactcaatgcgtacattggt

SEQ ID NO: 269 - DNA, 20 bp, synthetic construct
  source 1..20: mol_type = other DNA
gggttccattacggccagcg

SEQ ID NO: 270 - DNA, 20 bp, synthetic construct
  source 1..20: mol_type = other DNA
ggcactgcttctgcgtacaa

SEQ ID NO: 271 - DNA, 20 bp, synthetic construct
  source 1..20: mol_type = other DNA
ggttgatgacaaggcggcac

SEQ ID NO: 272 - DNA, 20 bp, synthetic construct
  source 1..20: mol_type = other DNA
tgctggggccttcctcgagg

SEQ ID NO: 273 - DNA, 20 bp, synthetic construct
  source 1..20: mol_type = other DNA
ttgctggctgtggagcggac

SEQ ID NO: 274 - DNA, 20 bp, synthetic construct
  source 1..20: mol_type = other DNA
ttctcctaccttcgggaatc

SEQ ID NO: 275 - DNA, 20 bp, synthetic construct
  source 1..20: mol_type = other DNA
gactggcttgggcagttcca

SEQ ID NO: 276 - DNA, 20 bp, synthetic construct
  source 1..20: mol_type = other DNA
catgcagcccttgcctgctg

SEQ ID NO: 277 - DNA, 20 bp, synthetic construct
  source 1..20: mol_type = other DNA
agcaaaggacgaggtctaga

SEQ ID NO: 278 - DNA, 20 bp, synthetic construct
  source 1..20: mol_type = other DNA
gcctgctggggccttcctcg

SEQ ID NO: 279 - DNA, 20 bp, synthetic construct
  source 1..20: mol_type = other DNA
cagactcaccagattcccga

SEQ ID NO: 280 - DNA, 20 bp, synthetic construct
  source 1..20: mol_type = other DNA
acctcgtcctttgctggctg

SEQ ID NO: 281 - DNA, 20 bp, synthetic construct
  source 1..20: mol_type = other DNA
ctcaccagattcccgaaggt

SEQ ID NO: 282 - DNA, 20 bp, synthetic construct
  source 1..20: mol_type = other DNA
tacgcagaagcagtgcccgc

SEQ ID NO: 283 - DNA, 20 bp, synthetic construct
  source 1..20: mol_type = other DNA
aggtgtacagcagtggctgg

SEQ ID NO: 284 - DNA, 20 bp, synthetic construct
  source 1..20: mol_type = other DNA
ggtgtacagcagtggctggt

SEQ ID NO: 285 - DNA, 20 bp, synthetic construct
  source 1..20: mol_type = other DNA
cggatgtggtcagccttgtg

SEQ ID NO: 286 - DNA, 20 bp, synthetic construct
  source 1..20: mol_type = other DNA
cactgacagcgtgaacaggt

SEQ ID NO: 287 - DNA, 20 bp, synthetic construct
  source 1..20: mol_type = other DNA
actgacagcgtgaacaggta

SEQ ID NO: 288 - DNA, 20 bp, synthetic construct
  source 1..20: mol_type = other DNA
gctcactctctgtctgggct

SEQ ID NO: 289 - DNA, 20 bp, synthetic construct
  source 1..20: mol_type = other DNA
ctggctgtggagcggactgg

SEQ ID NO: 290 - DNA, 20 bp, synthetic construct
  source 1..20: mol_type = other DNA
gctctgactgtacggggcaa

SEQ ID NO: 291 - DNA, 20 bp, synthetic construct
  source 1..20: mol_type = other DNA
agctctgactgtacggggca

SEQ ID NO: 292 - DNA, 20 bp, synthetic construct
  source 1..20: mol_type = other DNA
acagtaccccttccagctct

SEQ ID NO: 293 - DNA, 20 bp, synthetic construct
  source 1..20: mol_type = other DNA
cgtcggccaccagacggttg

SEQ ID NO: 294 - DNA, 20 bp, synthetic construct
  source 1..20: mol_type = other DNA
ccagccactgctgtacacct

SEQ ID NO: 295 - DNA, 20 bp, synthetic construct
  source 1..20: mol_type = other DNA
accccggccctgcctatgcc

SEQ ID NO: 296 - DNA, 20 bp, synthetic construct
  source 1..20: mol_type = other DNA
ggtatcagcagtgcaggagg

SEQ ID NO: 297 - DNA, 20 bp, synthetic construct
  source 1..20: mol_type = other DNA
gatgtggtcagccttgtgca

SEQ ID NO: 298 - DNA, 20 bp, synthetic construct
  source 1..20: mol_type = other DNA
ggatgtggtcagccttgtgc

SEQ ID NO: 299 - DNA, 20 bp, synthetic construct
  source 1..20: mol_type = other DNA
ggccacgcatcctggccttt

SEQ ID NO: 300 - DNA, 20 bp, synthetic construct
  source 1..20: mol_type = other DNA
gaaaggccaggatgcgtggc

SEQ ID NO: 301 - DNA, 20 bp, synthetic construct
  source 1..20: mol_type = other DNA
actgcttgtccaggccacgc

SEQ ID NO: 302 - DNA, 20 bp, synthetic construct
  source 1..20: mol_type = other DNA
tctggactccaactgcttgt

SEQ ID NO: 303 - DNA, 20 bp, synthetic construct
  source 1..20: mol_type = other DNA
gtctggactccaactgcttg

SEQ ID NO: 304 - DNA, 20 bp, synthetic construct
  source 1..20: mol_type = other DNA
gcttccgtctggactccaac

SEQ ID NO: 305 - DNA, 20 bp, synthetic construct
  source 1..20: mol_type = other DNA
gacggaagctggagtcggca

SEQ ID NO: 306 - DNA, 20 bp, synthetic construct
  source 1..20: mol_type = other DNA
cgctgtcagtgaaaaccact

SEQ ID NO: 307 - DNA, 20 bp, synthetic construct
  source 1..20: mol_type = other DNA
ctgacagcgtgaacaggtag

SEQ ID NO: 308 - DNA, 20 bp, synthetic construct
  source 1..20: mol_type = other DNA
ttacggccagcgaggcccga

SEQ ID NO: 309 - DNA, 20 bp, synthetic construct
  source 1..20: mol_type = other DNA
attacggccagcgaggcccg

SEQ ID NO: 310 - DNA, 20 bp, synthetic construct
  source 1..20: mol_type = other DNA
ggaatctggtgagtctgagg

SEQ ID NO: 311 - DNA, 20 bp, synthetic construct
  source 1..20: mol_type = other DNA
ccctcagactcaccagattc

SEQ ID NO: 312 - DNA, 20 bp, synthetic construct
  source 1..20: mol_type = other DNA
cgaaggtaggagaaggtctt

SEQ ID NO: 313 - DNA, 20 bp, synthetic construct
  source 1..20: mol_type = other DNA
gaaggtaggagaaggtcttg

SEQ ID NO: 314 - DNA, 20 bp, synthetic construct
  source 1..20: mol_type = other DNA
gcacctttggctcactctct

SEQ ID NO: 315 - DNA, 20 bp, synthetic construct
  source 1..20: mol_type = other DNA
tcgaggaggtggcagagggt

SEQ ID NO: 316 - DNA, 20 bp, synthetic construct
  source 1..20: mol_type = other DNA
tggaactgcccaagccagtc

SEQ ID NO: 317 - DNA, 20 bp, synthetic construct
  source 1..20: mol_type = other DNA
agggacggggcccacagggg

SEQ ID NO: 318 - DNA, 20 bp, synthetic construct
  source 1..20: mol_type = other DNA
gggacggggcccacaggggc

SEQ ID NO: 319 - DNA, 20 bp, synthetic construct
  source 1..20: mol_type = other DNA
ctccacagccagcaaaggac

SEQ ID NO: 320 - DNA, 20 bp, synthetic construct
  source 1..20: mol_type = other DNA
cagccagcaaaggacgaggt

SEQ ID NO: 321 - DNA, 20 bp, synthetic construct
  source 1..20: mol_type = other DNA
ctgccttctagacctcgtcc

SEQ ID NO: 322 - DNA, 20 bp, synthetic construct
  source 1..20: mol_type = other DNA
cctaaggaggatgcgcctag

SEQ ID NO: 323 - DNA, 20 bp, synthetic construct
  source 1..20: mol_type = other DNA
tggcctcctgcactgctgat

SEQ ID NO: 324 - DNA, 20 bp, synthetic construct
  source 1..20: mol_type = other DNA
agcagtgcaggaggccacat

SEQ ID NO: 325 - DNA, 20 bp, synthetic construct
  source 1..20: mol_type = other DNA
ccgactccagcttccgtctg

SEQ ID NO: 326 - DNA, 20 bp, synthetic construct
  source 1..20: mol_type = other DNA
ggggttccattacggccagc

SEQ ID NO: 327 - DNA, 20 bp, synthetic construct
  source 1..20: mol_type = other DNA
cacagcagatcctcctctgg

SEQ ID NO: 328 - DNA, 20 bp, synthetic construct
  source 1..20: mol_type = other DNA
attgccccgtacagtcagag

SEQ ID NO: 329 - DNA, 20 bp, synthetic construct
  source 1..20: mol_type = other DNA
cccgtacagtcagagctgga

SEQ ID NO: 330 - DNA, 20 bp, synthetic construct
  source 1..20: mol_type = other DNA
tggtggaggagcaggcagtg

SEQ ID NO: 331 - DNA, 20 bp, synthetic construct
  source 1..20: mol_type = other DNA
tccttaggcataggcagggc

SEQ ID NO: 332 - DNA, 20 bp, synthetic construct
  source 1..20: mol_type = other DNA
cggccctgcctatgcctaag

SEQ ID NO: 333 - DNA, 20 bp, synthetic construct
  source 1..20: mol_type = other DNA
taggcataggcagggccggg

SEQ ID NO: 334 - DNA, 20 bp, synthetic construct
  source 1..20: mol_type = other DNA
aggcagggccggggtgggag

SEQ ID NO: 335 - DNA, 20 bp, synthetic construct
  source 1..20: mol_type = other DNA
gcaggatcggggctgtcgct

SEQ ID NO: 336 - DNA, 20 bp, synthetic construct
  source 1..20: mol_type = other DNA
ctgcacaaggctgaccacat

SEQ ID NO: 337 - DNA, 20 bp, synthetic construct
  source 1..20: mol_type = other DNA
tgcacaaggctgaccacatc

SEQ ID NO: 338 - DNA, 20 bp, synthetic construct
  source 1..20: mol_type = other DNA
ctgaccacatccggaaaggc

SEQ ID NO: 339 - DNA, 20 bp, synthetic construct
  source 1..20: mol_type = other DNA
ggccacgcatcctggccttt

SEQ ID NO: 340 - DNA, 20 bp, synthetic construct
  source 1..20: mol_type = other DNA
gcgtggcctggacaagcagt

SEQ ID NO: 341 - DNA, 20 bp, synthetic construct
  source 1..20: mol_type = other DNA
gacaagcagttggagtccag

SEQ ID NO: 342 - DNA, 20 bp, synthetic construct
  source 1..20: mol_type = other DNA
gttggagtccagacggaagc

SEQ ID NO: 343 - DNA, 20 bp, synthetic construct
  source 1..20: mol_type = other DNA
atgcgtacattggtggggcc

SEQ ID NO: 344 - DNA, 20 bp, synthetic construct
  source 1..20: mol_type = other DNA
tggccccaccaatgtacgca

SEQ ID NO: 345 - DNA, 20 bp, synthetic construct
  source 1..20: mol_type = other DNA
gctacctgttcacgctgtca

SEQ ID NO: 346 - DNA, 20 bp, synthetic construct
  source 1..20: mol_type = other DNA
tgacagcgtgaacaggtagc

SEQ ID NO: 347 - DNA, 20 bp, synthetic construct
  source 1..20: mol_type = other DNA
gtcgggcctcgctggccgta

SEQ ID NO: 348 - DNA, 20 bp, synthetic construct
  source 1..20: mol_type = other DNA
gcacttgcctaggctggtat

SEQ ID NO: 349 - DNA, 20 bp, synthetic construct
  source 1..20: mol_type = other DNA
gggaatctggtgagtctgag

SEQ ID NO: 350 - DNA, 20 bp, synthetic construct
  source 1..20: mol_type = other DNA
ctcaccagattcccgaaggt

SEQ ID NO: 351 - DNA, 20 bp, synthetic construct
  source 1..20: mol_type = other DNA
ctcctaccttcgggaatctg

SEQ ID NO: 352 - DNA, 20 bp, synthetic construct
  source 1..20: mol_type = other DNA
caagaccttctcctaccttc

SEQ ID NO: 353 - DNA, 20 bp, synthetic construct
  source 1..20: mol_type = other DNA
ccaagaccttctcctacctt

SEQ ID NO: 354 - DNA, 20 bp, synthetic construct
  source 1..20: mol_type = other DNA
gccaagaccttctcctacct

SEQ ID NO: 355 - DNA, 20 bp, synthetic construct
  source 1..20: mol_type = other DNA
tatgcacagcagatcctcct

SEQ ID NO: 356 - DNA, 20 bp, synthetic construct
  source 1..20: mol_type = other DNA
caaaggtgctggacccagag

SEQ ID NO: 357 - DNA, 20 bp, synthetic construct
  source 1..20: mol_type = other DNA
ggctcactctctgtctgggc

SEQ ID NO: 358 - DNA, 20 bp, synthetic construct
  source 1..20: mol_type = other DNA
agggtaccccagcccagaca

SEQ ID NO: 359 - DNA, 20 bp, synthetic construct
  source 1..20: mol_type = other DNA
agagggtaccccagcccaga

SEQ ID NO: 360 - DNA, 20 bp, synthetic construct
  source 1..20: mol_type = other DNA
gtaccctctgccacctcctc

SEQ ID NO: 361 - DNA, 20 bp, synthetic construct
  source 1..20: mol_type = other DNA
ccttcctcgaggaggtggca

SEQ ID NO: 362 - DNA, 20 bp, synthetic construct
  source 1..20: mol_type = other DNA
atgactggcttgggcagttc

SEQ ID NO: 363 - DNA, 20 bp, synthetic construct
  source 1..20: mol_type = other DNA
ggcccctgtgggccccgtcc

SEQ ID NO: 364 - DNA, 20 bp, synthetic construct
  source 1..20: mol_type = other DNA
aggacgaggtctagaaggca

SEQ ID NO: 365 - DNA, 20 bp, synthetic construct
  source 1..20: mol_type = other DNA
tataagtggaggcgtcgcgc

SEQ ID NO: 366 - DNA, 20 bp, synthetic construct
  source 1..20: mol_type = other DNA
gggcacgcgtttaatataag

SEQ ID NO: 367 - DNA, 20 bp, synthetic construct
  source 1..20: mol_type = other DNA
actcacgctggatagcctcc

SEQ ID NO: 368 - DNA, 20 bp, synthetic construct
  source 1..20: mol_type = other DNA
ggccgagatgtctcgctccg

SEQ ID NO: 369 - DNA, 20 bp, synthetic construct
  source 1..20: mol_type = other DNA
cacgcgtttaatataagtgg

SEQ ID NO: 370 - DNA, 20 bp, synthetic construct
  source 1..20: mol_type = other DNA
aagtggaggcgtcgcgctgg

SEQ ID NO: 371 - DNA, 20 bp, synthetic construct
  source 1..20: mol_type = other DNA
gagtagcgcgagcacagcta

SEQ ID NO: 372 - DNA, 20 bp, synthetic construct
  source 1..20: mol_type = other DNA
agtggaggcgtcgcgctggc

SEQ ID NO: 373 - DNA, 20 bp, synthetic construct
  source 1..20: mol_type = other DNA
gcccgaatgctgtcagcttc

SEQ ID NO: 374 - DNA, 20 bp, synthetic construct
  source 1..20: mol_type = other DNA
cgcgagcacagctaaggcca

SEQ ID NO: 375 - DNA, 20 bp, synthetic construct
  source 1..20: mol_type = other DNA
ctcgcgctactctctctttc

SEQ ID NO: 376 - DNA, 20 bp, synthetic construct
  source 1..20: mol_type = other DNA
ggccacggagcgagacatct

SEQ ID NO: 377 - DNA, 20 bp, synthetic construct
  source 1..20: mol_type = other DNA
cgtgagtaaacctgaatctt

SEQ ID NO: 378 - DNA, 20 bp, synthetic construct
  source 1..20: mol_type = other DNA
agtcacatggttcacacggc

SEQ ID NO: 379 - DNA, 20 bp, synthetic construct
  source 1..20: mol_type = other DNA
aagtcaacttcaatgtcgga

SEQ ID NO: 380 - DNA, 20 bp, synthetic construct
  source 1..20: mol_type = other DNA
cagtaagtcaacttcaatgt

SEQ ID NO: 381 - DNA, 20 bp, synthetic construct
  source 1..20: mol_type = other DNA
acccagacacatagcaattc

SEQ ID NO: 382 - DNA, 20 bp, synthetic construct
  source 1..20: mol_type = other DNA
gcatactcatctttttcagt

SEQ ID NO: 383 - DNA, 20 bp, synthetic construct
  source 1..20: mol_type = other DNA
acagcccaagatagttaagt

SEQ ID NO: 384 - DNA, 20 bp, synthetic construct
  source 1..20: mol_type = other DNA
ggcatactcatctttttcag

SEQ ID NO: 385 - DNA, 20 bp, synthetic construct
  source 1..20: mol_type = other DNA
ttcctgaagctgacagcatt

SEQ ID NO: 386 - DNA, 20 bp, synthetic construct
  source 1..20: mol_type = other DNA
tcacgtcatccagcagagaa

SEQ ID NO: 387 - DNA, 20 bp, synthetic construct
  source 1..20: mol_type = other DNA
cagcccaagatagttaagtg

SEQ ID NO: 388 - RNA, 18 nt, synthetic construct
  source 1..18: mol_type = other RNA
aattctctctccattctt

SEQ ID NO: 389 - RNA, 19 nt, synthetic construct
  source 1..19: mol_type = other RNA
aattctctctccattcttc

SEQ ID NO: 390 - RNA, 20 nt, synthetic construct
  source 1..20: mol_type = other RNA
aattctctctccattcttca

SEQ ID NO: 391 - RNA, 21 nt, synthetic construct
  source 1..21: mol_type = other RNA
aattctctctccattcttcag

SEQ ID NO: 392 - RNA, 22 nt, synthetic construct
  source 1..22: mol_type = other RNA
aattctctctccattcttcagt

SEQ ID NO: 393 - RNA, 23 nt, synthetic construct
  source 1..23: mol_type = other RNA
aattctctctccattcttcagta

SEQ ID NO: 394 - RNA, 24 nt, synthetic construct
  source 1..24: mol_type = other RNA
aattctctctccattcttcagtaa

SEQ ID NO: 395 - RNA, 18 nt, synthetic construct
  source 1..18: mol_type = other RNA
actttccattctctgctg

SEQ ID NO: 396 - RNA, 19 nt, synthetic construct
  source 1..19: mol_type = other RNA
actttccattctctgctgg

SEQ ID NO: 397 - RNA, 20 nt, synthetic construct
  source 1..20: mol_type = other RNA
actttccattctctgctgga

SEQ ID NO: 398 - RNA, 21 nt, synthetic construct
  source 1..21: mol_type = other RNA
actttccattctctgctggat

SEQ ID NO: 399 - RNA, 22 nt, synthetic construct
  source 1..22: mol_type = other RNA
actttccattctctgctggatg

SEQ ID NO: 400 - RNA, 23 nt, synthetic construct
  source 1..23: mol_type = other RNA
actttccattctctgctggatga

SEQ ID NO: 401 - RNA, 24 nt, synthetic construct
  source 1..24: mol_type = other RNA
actttccattctctgctggatgac

SEQ ID NO: 402 - RNA, 18 nt, synthetic construct
  source 1..18: mol_type = other RNA
agcaaggactggtctttc

SEQ ID NO: 403 - RNA, 19 nt, synthetic construct
  source 1..19: mol_type = other RNA
agcaaggactggtctttct

SEQ ID NO: 404 - RNA, 20 nt, synthetic construct
  source 1..20: mol_type = other RNA
agcaaggactggtctttcta

SEQ ID NO: 405 - RNA, 21 nt, synthetic construct
  source 1..21: mol_type = other RNA
agcaaggactggtctttctat

SEQ ID NO: 406 - RNA, 22 nt, synthetic construct
  source 1..22: mol_type = other RNA
agcaaggactggtctttctatc

SEQ ID NO: 407 - RNA, 23 nt, synthetic construct
  source 1..23: mol_type = other RNA
agcaaggactggtctttctatct

SEQ ID NO: 408 - RNA, 24 nt, synthetic construct
  source 1..24: mol_type = other RNA
agcaaggactggtctttctatctc

SEQ ID NO: 409 - RNA, 18 nt, synthetic construct
  source 1..18: mol_type = other RNA
agtgggggtgaattcagt

SEQ ID NO: 410 - RNA, 19 nt, synthetic construct
  source 1..19: mol_type = other RNA
agtgggggtgaattcagtg

SEQ ID NO: 411 - RNA, 20 nt, synthetic construct
  source 1..20: mol_type = other RNA
agtgggggtgaattcagtgt

SEQ ID NO: 412 - RNA, 21 nt, synthetic construct
  source 1..21: mol_type = other RNA
agtgggggtgaattcagtgta

SEQ ID NO: 413 - RNA, 22 nt, synthetic construct
  source 1..22: mol_type = other RNA
agtgggggtgaattcagtgtag

SEQ ID NO: 414 - RNA, 23 nt, synthetic construct
  source 1..23: mol_type = other RNA
agtgggggtgaattcagtgtagt

SEQ ID NO: 415 - RNA, 24 nt, synthetic construct
  source 1..24: mol_type = other RNA
agtgggggtgaattcagtgtagta

SEQ ID NO: 416 - RNA, 18 nt, synthetic construct
  source 1..18: mol_type = other RNA
atccatccgacattgaag

SEQ ID NO: 417 - RNA, 19 nt, synthetic construct
  source 1..19: mol_type = other RNA
atccatccgacattgaagt

SEQ ID NO: 418 - RNA, 20 nt, synthetic construct
  source 1..20: mol_type = other RNA
atccatccgacattgaagtt

SEQ ID NO: 419 - RNA, 21 nt, synthetic construct
  source 1..21: mol_type = other RNA
atccatccgacattgaagttg

SEQ ID NO: 420 - RNA, 22 nt, synthetic construct
  source 1..22: mol_type = other RNA
atccatccgacattgaagttga

SEQ ID NO: 421 - RNA, 23 nt, synthetic construct
  source 1..23: mol_type = other RNA
atccatccgacattgaagttgac

SEQ ID NO: 422 - RNA, 24 nt, synthetic construct
  source 1..24: mol_type = other RNA
atccatccgacattgaagttgact

SEQ ID NO: 423 - RNA, 18 nt, synthetic construct
  source 1..18: mol_type = other RNA
caattctctctccattct

SEQ ID NO: 424 - RNA, 19 nt, synthetic construct
  source 1..19: mol_type = other RNA
caattctctctccattctt

SEQ ID NO: 425 - RNA, 20 nt, synthetic construct
  source 1..20: mol_type = other RNA
caattctctctccattcttc

SEQ ID NO: 426 - RNA, 21 nt, synthetic construct
  source 1..21: mol_type = other RNA
caattctctctccattcttca

SEQ ID NO: 427 - RNA, 22 nt, synthetic construct
  source 1..22: mol_type = other RNA
caattctctctccattcttcag

SEQ ID NO: 428 - RNA, 23 nt, synthetic construct
  source 1..23: mol_type = other RNA
caattctctctccattcttcagt

SEQ ID NO: 429 - RNA, 24 nt, synthetic construct
  source 1..24: mol_type = other RNA
caattctctctccattcttcagta

SEQ ID NO: 430 - RNA, 18 nt, synthetic construct
  source 1..18: mol_type = other RNA
cagtgggggtgaattcag

SEQ ID NO: 431 - RNA, 19 nt, synthetic construct
  source 1..19: mol_type = other RNA
cagtgggggtgaattcagt

SEQ ID NO: 432 - RNA, 20 nt, synthetic construct
  source 1..20: mol_type = other RNA
cagtgggggtgaattcagtg

SEQ ID NO: 433 - RNA, 21 nt, synthetic construct
  source 1..21: mol_type = other RNA
cagtgggggtgaattcagtgt

SEQ ID NO: 434 - RNA, 22 nt, synthetic construct
  source 1..22: mol_type = other RNA
cagtgggggtgaattcagtgta

SEQ ID NO: 435 - RNA, 23 nt, synthetic construct
  source 1..23: mol_type = other RNA
cagtgggggtgaattcagtgtag

SEQ ID NO: 436 - RNA, 24 nt, synthetic construct
  source 1..24: mol_type = other RNA
cagtgggggtgaattcagtgtagt

SEQ ID NO: 437 - RNA, 18 nt, synthetic construct
  source 1..18: mol_type = other RNA
cattctctgctggatgac

SEQ ID NO: 438 - RNA, 19 nt, synthetic construct
  source 1..19: mol_type = other RNA
cattctctgctggatgacg

SEQ ID NO: 439 - RNA, 20 nt, synthetic construct
  source 1..20: mol_type = other RNA
cattctctgctggatgacgt

SEQ ID NO: 440 - RNA, 21 nt, synthetic construct
  source 1..21: mol_type = other RNA
cattctctgctggatgacgtg

SEQ ID NO: 441 - RNA, 22 nt, synthetic construct
  source 1..22: mol_type = other RNA
cattctctgctggatgacgtga

SEQ ID NO: 442 - RNA, 23 nt, synthetic construct
  source 1..23: mol_type = other RNA
cattctctgctggatgacgtgag

SEQ ID NO: 443 - RNA, 24 nt, synthetic construct
  source 1..24: mol_type = other RNA
cattctctgctggatgacgtgagt

SEQ ID NO: 444 - RNA, 18 nt, synthetic construct
  source 1..18: mol_type = other RNA
cccgatattcctcaggta

SEQ ID NO: 445 - RNA, 19 nt, synthetic construct
  source 1..19: mol_type = other RNA
cccgatattcctcaggtac

SEQ ID NO: 446 - RNA, 20 nt, synthetic construct
  source 1..20: mol_type = other RNA
cccgatattcctcaggtact

SEQ ID NO: 447 - RNA, 21 nt, synthetic construct
  source 1..21: mol_type = other RNA
cccgatattcctcaggtactc

SEQ ID NO: 448 - RNA, 22 nt, synthetic construct
  source 1..22: mol_type = other RNA
cccgatattcctcaggtactcc

SEQ ID NO: 449 - RNA, 23 nt, synthetic construct
  source 1..23: mol_type = other RNA
cccgatattcctcaggtactcca

SEQ ID NO: 450 - RNA, 24 nt, synthetic construct
  source 1..24: mol_type = other RNA
cccgatattcctcaggtactccaa

SEQ ID NO: 451 - RNA, 18 nt, synthetic construct
  source 1..18: mol_type = other RNA
ccgatattcctcaggtac

SEQ ID NO: 452 - RNA, 19 nt, synthetic construct
  source 1..19: mol_type = other RNA
ccgatattcctcaggtact

SEQ ID NO: 453 - RNA, 20 nt, synthetic construct
  source 1..20: mol_type = other RNA
ccgatattcctcaggtactc

SEQ ID NO: 454 - RNA, 21 nt, synthetic construct
  source 1..21: mol_type = other RNA
ccgatattcctcaggtactcc

SEQ ID NO: 455 - RNA, 22 nt, synthetic construct
  source 1..22: mol_type = other RNA
ccgatattcctcaggtactcca

SEQ ID NO: 456 - RNA, 23 nt, synthetic construct
  source 1..23: mol_type = other RNA
ccgatattcctcaggtactccaa

SEQ ID NO: 457 - RNA, 24 nt, synthetic construct
  source 1..24: mol_type = other RNA
ccgatattcctcaggtactccaaa

SEQ ID NO: 458 - RNA, 18 nt, synthetic construct
  source 1..18: mol_type = other RNA
ctcacgtcatccagcaga

SEQ ID NO: 459 - RNA, 19 nt, synthetic construct
  source 1..19: mol_type = other RNA
ctcacgtcatccagcagag

SEQ ID NO: 460 - RNA, 20 nt, synthetic construct
  source 1..20: mol_type = other RNA
ctcacgtcatccagcagaga

SEQ ID NO: 461 - RNA, 21 nt, synthetic construct
  source 1..21: mol_type = other RNA
ctcacgtcatccagcagagaa

SEQ ID NO: 462 - RNA, 22 nt, synthetic construct
  source 1..22: mol_type = other RNA
ctcacgtcatccagcagagaat

SEQ ID NO: 463 - RNA, 23 nt, synthetic construct
  source 1..23: mol_type = other RNA
ctcacgtcatccagcagagaatg

SEQ ID NO: 464 - RNA, 24 nt, synthetic construct
  source 1..24: mol_type = other RNA
ctcacgtcatccagcagagaatgg

SEQ ID NO: 465 - RNA, 18 nt, synthetic construct
  source 1..18: mol_type = other RNA
ctgaattgctatgtgtct

SEQ ID NO: 466 - RNA, 19 nt, synthetic construct
  source 1..19: mol_type = other RNA
ctgaattgctatgtgtctg

SEQ ID NO: 467 - RNA, 20 nt, synthetic construct
  source 1..20: mol_type = other RNA
ctgaattgctatgtgtctgg

SEQ ID NO: 468 - RNA, 21 nt, synthetic construct
  source 1..21: mol_type = other RNA
ctgaattgctatgtgtctggg

SEQ ID NO: 469 - RNA, 22 nt, synthetic construct
  source 1..22: mol_type = other RNA
ctgaattgctatgtgtctgggt

SEQ ID NO: 470 - RNA, 23 nt, synthetic construct
  source 1..23: mol_type = other RNA
ctgaattgctatgtgtctgggtt

SEQ ID NO: 471 - RNA, 24 nt, synthetic construct
  source 1..24: mol_type = other RNA
ctgaattgctatgtgtctgggttt

SEQ ID NO: 472 - RNA, 18 nt, synthetic construct
  source 1..18: mol_type = other RNA
gagtacctgaggaatatc

SEQ ID NO: 473 - RNA, 19 nt, synthetic construct
  source 1..19: mol_type = other RNA
gagtacctgaggaatatcg

SEQ ID NO: 474 - RNA, 20 nt, synthetic construct
  source 1..20: mol_type = other RNA
gagtacctgaggaatatcgg

SEQ ID NO: 475 - RNA, 21 nt, synthetic construct
  source 1..21: mol_type = other RNA
gagtacctgaggaatatcggg

SEQ ID NO: 476 - RNA, 22 nt, synthetic construct
  source 1..22: mol_type = other RNA
gagtacctgaggaatatcggga

SEQ ID NO: 477 - RNA, 23 nt, synthetic construct
  source 1..23: mol_type = other RNA
gagtacctgaggaatatcgggaa

SEQ ID NO: 478 - RNA, 24 nt, synthetic construct
  source 1..24: mol_type = other RNA
gagtacctgaggaatatcgggaaa

SEQ ID NO: 479 - RNA, 18 nt, synthetic construct
  source 1..18: mol_type = other RNA
tatctcttgtactacact

SEQ ID NO: 480 - RNA, 19 nt, synthetic construct
  source 1..19: mol_type = other RNA
tatctcttgtactacactg

SEQ ID NO: 481 - RNA, 20 nt, synthetic construct
  source 1..20: mol_type = other RNA
tatctcttgtactacactga

SEQ ID NO: 482 - RNA, 21 nt, synthetic construct
  source 1..21: mol_type = other RNA
tatctcttgtactacactgaa

SEQ ID NO: 483 - RNA, 22 nt, synthetic construct
  source 1..22: mol_type = other RNA
tatctcttgtactacactgaat

SEQ ID NO: 484 - RNA, 23 nt, synthetic construct
  source 1..23: mol_type = other RNA
tatctcttgtactacactgaatt

SEQ ID NO: 485 - RNA, 24 nt, synthetic construct
  source 1..24: mol_type = other RNA
tatctcttgtactacactgaattc

SEQ ID NO: 486 - RNA, 18 nt, synthetic construct
  source 1..18: mol_type = other RNA
tcaattctctctccattc

SEQ ID NO: 487 - RNA, 19 nt, synthetic construct
  source 1..19: mol_type = other RNA
tcaattctctctccattct

SEQ ID NO: 488 - RNA, 20 nt, synthetic construct
  source 1..20: mol_type = other RNA
tcaattctctctccattctt

SEQ ID NO: 489 - RNA, 21 nt, synthetic construct
  source 1..21: mol_type = other RNA
tcaattctctctccattcttc

SEQ ID NO: 490 - RNA, 22 nt, synthetic construct
  source 1..22: mol_type = other RNA
tcaattctctctccattcttca

SEQ ID NO: 491 - RNA, 23 nt, synthetic construct
  source 1..23: mol_type = other RNA
tcaattctctctccattcttcag

SEQ ID NO: 492 - RNA, 24 nt, synthetic construct
  source 1..24: mol_type = other RNA
tcaattctctctccattcttcagt

SEQ ID NO: 493 - RNA, 18 nt, synthetic construct
  source 1..18: mol_type = other RNA
tcacagcccaagatagtt

SEQ ID NO: 494 - RNA, 19 nt, synthetic construct
  source 1..19: mol_type = other RNA
tcacagcccaagatagtta

SEQ ID NO: 495 - RNA, 20 nt, synthetic construct
  source 1..20: mol_type = other RNA
tcacagcccaagatagttaa

SEQ ID NO: 496 - RNA, 21 nt, synthetic construct
  source 1..21: mol_type = other RNA
tcacagcccaagatagttaag

SEQ ID NO: 497 - RNA, 22 nt, synthetic construct
  source 1..22: mol_type = other RNA
tcacagcccaagatagttaagt

SEQ ID NO: 498 - RNA, 23 nt, synthetic construct
  source 1..23: mol_type = other RNA
tcacagcccaagatagttaagtg

SEQ ID NO: 499 - RNA, 24 nt, synthetic construct
  source 1..24: mol_type = other RNA
tcacagcccaagatagttaagtgg

SEQ ID NO: 500 - RNA, 18 nt, synthetic construct
  source 1..18: mol_type = other RNA
tcagtgggggtgaattca

SEQ ID NO: 501 - RNA, 19 nt, synthetic construct
  source 1..19: mol_type = other RNA
tcagtgggggtgaattcag

SEQ ID NO: 502 - RNA, 20 nt, synthetic construct
  source 1..20: mol_type = other RNA
tcagtgggggtgaattcagt

SEQ ID NO: 503 - RNA, 21 nt, synthetic construct
  source 1..21: mol_type = other RNA
tcagtgggggtgaattcagtg

SEQ ID NO: 504 - RNA, 22 nt, synthetic construct
  source 1..22: mol_type = other RNA
tcagtgggggtgaattcagtgt

SEQ ID NO: 505 - RNA, 23 nt, synthetic construct
  source 1..23: mol_type = other RNA
tcagtgggggtgaattcagtgta

SEQ ID NO: 506 - RNA, 24 nt, synthetic construct
  source 1..24: mol_type = other RNA
tcagtgggggtgaattcagtgtag

SEQ ID NO: 507 - RNA, 18 nt, synthetic construct
  source 1..18: mol_type = other RNA
tggcctggaggctatcca

SEQ ID NO: 508 - RNA, 19 nt, synthetic construct
  source 1..19: mol_type = other RNA
tggcctggaggctatccag

SEQ ID NO: 509 - RNA, 20 nt, synthetic construct
  source 1..20: mol_type = other RNA
tggcctggaggctatccagc

SEQ ID NO: 510 - RNA, 21 nt, synthetic construct
  source 1..21: mol_type = other RNA
tggcctggaggctatccagcg

SEQ ID NO: 511 - RNA, 22 nt, synthetic construct
  source 1..22: mol_type = other RNA
tggcctggaggctatccagcgt

SEQ ID NO: 512 - RNA, 23 nt, synthetic construct
  source 1..23: mol_type = other RNA
tggcctggaggctatccagcgtg

SEQ ID NO: 513 - RNA, 24 nt, synthetic construct
  source 1..24: mol_type = other RNA
tggcctggaggctatccagcgtga

SEQ ID NO: 514 - RNA, 18 nt, synthetic construct
  source 1..18: mol_type = other RNA
atagatcgagacatgtaa

SEQ ID NO: 515 - RNA, 19 nt, synthetic construct
  source 1..19: mol_type = other RNA
atagatcgagacatgtaag

SEQ ID NO: 516 - RNA, 20 nt, synthetic construct
  source 1..20: mol_type = other RNA
atagatcgagacatgtaagc

SEQ ID NO: 517 - RNA, 21 nt, synthetic construct
  source 1..21: mol_type = other RNA
atagatcgagacatgtaagca

SEQ ID NO: 518 - RNA, 22 nt, synthetic construct
  source 1..22: mol_type = other RNA
atagatcgagacatgtaagcag

SEQ ID NO: 519 - RNA, 23 nt, synthetic construct
  source 1..23: mol_type = other RNA
atagatcgagacatgtaagcagc

SEQ ID NO: 520 - RNA, 24 nt, synthetic construct
  source 1..24: mol_type = other RNA
atagatcgagacatgtaagcagca

SEQ ID NO: 521 - RNA, 18 nt, synthetic construct
  source 1..18: mol_type = other RNA
catagatcgagacatgta

SEQ ID NO: 522 - RNA, 19 nt, synthetic construct
  source 1..19: mol_type = other RNA
catagatcgagacatgtaa

SEQ ID NO: 523 - RNA, 20 nt, synthetic construct
  source 1..20: mol_type = other RNA
catagatcgagacatgtaag

SEQ ID NO: 524 - RNA, 21 nt, synthetic construct
  source 1..21: mol_type = other RNA
catagatcgagacatgtaagc

SEQ ID NO: 525 - RNA, 22 nt, synthetic construct
  source 1..22: mol_type = other RNA
catagatcgagacatgtaagca

SEQ ID NO: 526 - RNA, 23 nt, synthetic construct
  source 1..23: mol_type = other RNA
catagatcgagacatgtaagcag

SEQ ID NO: 527 - RNA, 24 nt, synthetic construct
  source 1..24: mol_type = other RNA
catagatcgagacatgtaagcagc

SEQ ID NO: 528 - RNA, 18 nt, synthetic construct
  source 1..18: mol_type = other RNA
ctccactgtctttttcat

SEQ ID NO: 529 - RNA, 19 nt, synthetic construct
  source 1..19: mol_type = other RNA
ctccactgtctttttcata

SEQ ID NO: 530 - RNA, 20 nt, synthetic construct
  source 1..20: mol_type = other RNA
ctccactgtctttttcatag

SEQ ID NO: 531 - RNA, 21 nt, synthetic construct
  source 1..21: mol_type = other RNA
ctccactgtctttttcataga

SEQ ID NO: 532 - RNA, 22 nt, synthetic construct
  source 1..22: mol_type = other RNA
ctccactgtctttttcatagat

SEQ ID NO: 533 - RNA, 23 nt, synthetic construct
  source 1..23: mol_type = other RNA
ctccactgtctttttcatagatc

SEQ ID NO: 534 - RNA, 24 nt, synthetic construct
  source 1..24: mol_type = other RNA
ctccactgtctttttcatagatcg

SEQ ID NO: 535 - RNA, 18 nt, synthetic construct
  source 1..18: mol_type = other RNA
tcatagatcgagacatgt

SEQ ID NO: 536 - RNA, 19 nt, synthetic construct
  source 1..19: mol_type = other RNA
tcatagatcgagacatgta

SEQ ID NO: 537 - RNA, 20 nt, synthetic construct
  source 1..20: mol_type = other RNA
tcatagatcgagacatgtaa

SEQ ID NO: 538 - RNA, 21 nt, synthetic construct
  source 1..21: mol_type = other RNA
tcatagatcgagacatgtaag

SEQ ID NO: 539 - RNA, 22 nt, synthetic construct
  source 1..22: mol_type = other RNA
tcatagatcgagacatgtaagc

SEQ ID NO: 540 - RNA, 23 nt, synthetic construct
  source 1..23: mol_type = other RNA
tcatagatcgagacatgtaagca

SEQ ID NO: 541 - RNA, 24 nt, synthetic construct
  source 1..24: mol_type = other RNA
tcatagatcgagacatgtaagcag

SEQ ID NO: 542 - RNA, 18 nt, synthetic construct
  source 1..18: mol_type = other RNA
tccactgtctttttcata

SEQ ID NO: 543 - RNA, 19 nt, synthetic construct
  source 1..19: mol_type = other RNA
tccactgtctttttcatag

SEQ ID NO: 544 - RNA, 20 nt, synthetic construct
  source 1..20: mol_type = other RNA
tccactgtctttttcataga

SEQ ID NO: 545 - RNA, 21 nt, synthetic construct
  source 1..21: mol_type = other RNA
tccactgtctttttcatagat

SEQ ID NO: 546 - RNA, 22 nt, synthetic construct
  source 1..22: mol_type = other RNA
tccactgtctttttcatagatc

SEQ ID NO: 547 - RNA, 23 nt, synthetic construct
  source 1..23: mol_type = other RNA
tccactgtctttttcatagatcg

SEQ ID NO: 548 - RNA, 24 nt, synthetic construct
  source 1..24: mol_type = other RNA
tccactgtctttttcatagatcga

SEQ ID NO: 549 - RNA, 18 nt, synthetic construct
  source 1..18: mol_type = other RNA
tctccactgtctttttca

SEQ ID NO: 550 - RNA, 19 nt, synthetic construct
  source 1..19: mol_type = other RNA
tctccactgtctttttcat

SEQ ID NO: 551 - RNA, 20 nt, synthetic construct
  source 1..20: mol_type = other RNA
tctccactgtctttttcata

SEQ ID NO: 552 - RNA, 21 nt, synthetic construct
  source 1..21: mol_type = other RNA
tctccactgtctttttcatag

SEQ ID NO: 553 - RNA, 22 nt, synthetic construct
  source 1..22: mol_type = other RNA
tctccactgtctttttcataga

SEQ ID NO: 554 - RNA, 23 nt, synthetic construct
  source 1..23: mol_type = other RNA
tctccactgtctttttcatagat

SEQ ID NO: 555 - RNA, 24 nt, synthetic construct
  source 1..24: mol_type = other RNA
tctccactgtctttttcatagatc

SEQ ID NO: 556 - RNA, 18 nt, synthetic construct
  source 1..18: mol_type = other RNA
ttctccactgtctttttc

SEQ ID NO: 557 - RNA, 19 nt, synthetic construct
  source 1..19: mol_type = other RNA
ttctccactgtctttttca

SEQ ID NO: 558 - RNA, 20 nt, synthetic construct
  source 1..20: mol_type = other RNA
ttctccactgtctttttcat

SEQ ID NO: 559 - RNA, 21 nt, synthetic construct
  source 1..21: mol_type = other RNA
ttctccactgtctttttcata

SEQ ID NO: 560 - RNA, 22 nt, synthetic construct
  source 1..22: mol_type = other RNA
ttctccactgtctttttcatag

SEQ ID NO: 561 - RNA, 23 nt, synthetic construct
  source 1..23: mol_type = other RNA
ttctccactgtctttttcataga

SEQ ID NO: 562 - RNA, 24 nt, synthetic construct
  source 1..24: mol_type = other RNA
ttctccactgtctttttcatagat

SEQ ID NO: 563 - RNA, 18 nt, synthetic construct
  source 1..18: mol_type = other RNA
tttctccactgtcttttt

SEQ ID NO: 564 - RNA, 19 nt, synthetic construct
  source 1..19: mol_type = other RNA
tttctccactgtctttttc

SEQ ID NO: 565 - RNA, 20 nt, synthetic construct
  source 1..20: mol_type = other RNA
tttctccactgtctttttca

SEQ ID NO: 566 - RNA, 21 nt, synthetic construct
  source 1..21: mol_type = other RNA
tttctccactgtctttttcat

SEQ ID NO: 567 - RNA, 22 nt, synthetic construct
  source 1..22: mol_type = other RNA
tttctccactgtctttttcata

SEQ ID NO: 568 - RNA, 23 nt, synthetic construct
  source 1..23: mol_type = other RNA
tttctccactgtctttttcatag

SEQ ID NO: 569 - RNA, 24 nt, synthetic construct
  source 1..24: mol_type = other RNA
tttctccactgtctttttcataga

SEQ ID NO: 570 - RNA, 18 nt, synthetic construct
  source 1..18: mol_type = other RNA
ttttctccactgtctttt

SEQ ID NO: 571 - RNA, 19 nt, synthetic construct
  source 1..19: mol_type = other RNA
ttttctccactgtcttttt

SEQ ID NO: 572 - RNA, 20 nt, synthetic construct
  source 1..20: mol_type = other RNA
ttttctccactgtctttttc

SEQ ID NO: 573 - RNA, 21 nt, synthetic construct
  source 1..21: mol_type = other RNA
ttttctccactgtctttttca

SEQ ID NO: 574 - RNA, 22 nt, synthetic construct
  source 1..22: mol_type = other RNA
ttttctccactgtctttttcat

SEQ ID NO: 575 - RNA, 23 nt, synthetic construct
  source 1..23: mol_type = other RNA
ttttctccactgtctttttcata

SEQ ID NO: 576 - RNA, 24 nt, synthetic construct
  source 1..24: mol_type = other RNA
ttttctccactgtctttttcatag

SEQ ID NO: 577 - DNA, 21 bp, synthetic construct
  source 1..21: mol_type = other DNA
gaggtaaagcgtttgcatttg

SEQ ID NO: 578 - DNA, 21 bp, synthetic construct
  source 1..21: mol_type = other DNA
cctctaaagcttatgcttaca

SEQ ID NO: 579 - DNA, 21 bp, synthetic construct
  source 1..21: mol_type = other DNA
agtcgatttacttgtagcact

SEQ ID NO: 580 - DNA, 21 bp, synthetic construct
  source 1..21: mol_type = other DNA
cttgtagcactgcacagttaa

SEQ ID NO: 581 - DNA, 21 bp, synthetic construct
  source 1..21: mol_type = other DNA
tccattacaggataaaagact

SEQ ID NO: 582 - DNA, 21 bp, synthetic construct
  source 1..21: mol_type = other DNA
ctccattacaggataaaagac

SEQ ID NO: 583 - DNA, 21 bp, synthetic construct
  source 1..21: mol_type = other DNA
tctccattacaggataaaaga

SEQ ID NO: 584 - DNA, 21 bp, synthetic construct
  source 1..21: mol_type = other DNA
atcctgtaatggagaaaaatc

SEQ ID NO: 585 - DNA, 21 bp, synthetic construct
  source 1..21: mol_type = other DNA
tcctgtaatggagaaaaatcc

SEQ ID NO: 586 - DNA, 21 bp, synthetic construct
  source 1..21: mol_type = other DNA
aaacatgagtaagttgttttg

SEQ ID NO: 587 - DNA, 21 bp, synthetic construct
  source 1..21: mol_type = other DNA
gctttcaaacatgagtaagtt

SEQ ID NO: 588 - DNA, 21 bp, synthetic construct
  source 1..21: mol_type = other DNA
aaagccaaaccattcattgtc

SEQ ID NO: 589 - DNA, 21 bp, synthetic construct
  source 1..21: mol_type = other DNA
gtaacagcagtcatcatccat

SEQ ID NO: 590 - DNA, 21 bp, synthetic construct
  source 1..21: mol_type = other DNA
accatcctcatggattggtgt

SEQ ID NO: 591 - DNA, 21 bp, synthetic construct
  source 1..21: mol_type = other DNA
tgtccatcatttcaccatcct

SEQ ID NO: 592 - DNA, 21 bp, synthetic construct
  source 1..21: mol_type = other DNA
gaaatttctgtccatcatttc

SEQ ID NO: 593 - DNA, 21 bp, synthetic construct
  source 1..21: mol_type = other DNA
agaaatttctgtccatcattt

SEQ ID NO: 594 - DNA, 21 bp, synthetic construct
  source 1..21: mol_type = other DNA
ttttagaaatttctgtccatc

SEQ ID NO: 595 - DNA, 21 bp, synthetic construct
  source 1..21: mol_type = other DNA
cttttagaaatttctgtccat

SEQ ID NO: 596 - DNA, 21 bp, synthetic construct
  source 1..21: mol_type = other DNA
ttttcttttagaaatttctgt

SEQ ID NO: 597 - DNA, 21 bp, synthetic construct
  source 1..21: mol_type = other DNA
taaaagaaaagaaagaatttt

SEQ ID NO: 598 - DNA, 21 bp, synthetic construct
  source 1..21: mol_type = other DNA
aaacatttacatcttaccatt

SEQ ID NO: 599 - DNA, 21 bp, synthetic construct
  source 1..21: mol_type = other DNA
catcttaccatttcttcttca

SEQ ID NO: 600 - DNA, 21 bp, synthetic construct
  source 1..21: mol_type = other DNA
tatagataatgaagaagaaat

SEQ ID NO: 601 - DNA, 21 bp, synthetic construct
  source 1..21: mol_type = other DNA
ttcttcattatctatagaaag

SEQ ID NO: 602 - DNA, 21 bp, synthetic construct
  source 1..21: mol_type = other DNA
ctggcctgtacttcgaagaac

SEQ ID NO: 603 - DNA, 21 bp, synthetic construct
  source 1..21: mol_type = other DNA
cttaccaatgtagtaacaact

SEQ ID NO: 604 - DNA, 21 bp, synthetic construct
  source 1..21: mol_type = other DNA
gcacgtcattgtggccattgt

SEQ ID NO: 605 - DNA, 21 bp, synthetic construct
  source 1..21: mol_type = other DNA
tttagcacgtcattgtggcca

SEQ ID NO: 606 - DNA, 21 bp, synthetic construct
  source 1..21: mol_type = other DNA
ccatcagctccagagaagctc

SEQ ID NO: 607 - DNA, 21 bp, synthetic construct
  source 1..21: mol_type = other DNA
tctccctgcagatttaccatc

SEQ ID NO: 608 - DNA, 21 bp, synthetic construct
  source 1..21: mol_type = other DNA
aaatgctttacctttgcagtg

SEQ ID NO: 609 - DNA, 21 bp, synthetic construct
  source 1..21: mol_type = other DNA
aatgctttacctttgcagtga

SEQ ID NO: 610 - DNA, 21 bp, synthetic construct
  source 1..21: mol_type = other DNA
cctttgcagtgataggttttg

SEQ ID NO: 611 - DNA, 21 bp, synthetic construct
  source 1..21: mol_type = other DNA
cagtgataggttttgtcattc

SEQ ID NO: 612 - DNA, 21 bp, synthetic construct
  source 1..21: mol_type = other DNA
aagggaatgacaaaacctatc

SEQ ID NO: 613 - DNA, 21 bp, synthetic construct
  source 1..21: mol_type = other DNA
caagggaatgacaaaacctat

SEQ ID NO: 614 - DNA, 21 bp, synthetic construct
  source 1..21: mol_type = other DNA
gtcattcccttgaaaatcctg

SEQ ID NO: 615 - DNA, 21 bp, synthetic construct
  source 1..21: mol_type = other DNA
tcattcccttgaaaatcctga

SEQ ID NO: 616 - DNA, 21 bp, synthetic construct
  source 1..21: mol_type = other DNA
tgaaggtttaattccgcatag

SEQ ID NO: 617 - DNA, 21 bp, synthetic construct
  source 1..21: mol_type = other DNA
gaaggtttaattccgcatagg

SEQ ID NO: 618 - DNA, 21 bp, synthetic construct
  source 1..21: mol_type = other DNA
aaggtttaattccgcataggt

SEQ ID NO: 619 - DNA, 21 bp, synthetic construct
  source 1..21: mol_type = other DNA
attccgcataggttatttcct

SEQ ID NO: 620 - DNA, 21 bp, synthetic construct
  source 1..21: mol_type = other DNA
gcaactgaacaggaaataacc

SEQ ID NO: 621 - DNA, 21 bp, synthetic construct
  source 1..21: mol_type = other DNA
agcaactgaacaggaaataac

SEQ ID NO: 622 - DNA, 21 bp, synthetic construct
  source 1..21: mol_type = other DNA
ctgttcagttgctaaaatgga

SEQ ID NO: 623 - DNA, 21 bp, synthetic construct
  source 1..21: mol_type = other DNA
tattgcctttaggttttcgtt

SEQ ID NO: 624 - DNA, 21 bp, synthetic construct
  source 1..21: mol_type = other DNA
attgcctttaggttttcgttg

SEQ ID NO: 625 - DNA, 21 bp, synthetic construct
  source 1..21: mol_type = other DNA
ttgcctttaggttttcgttgc

SEQ ID NO: 626 - DNA, 21 bp, synthetic construct
  source 1..21: mol_type = other DNA
ggttttcgttgctgcctcttt

SEQ ID NO: 627 - DNA, 21 bp, synthetic construct
  source 1..21: mol_type = other DNA
cgttgctgcctctttgggttt

SEQ ID NO: 628 - DNA, 21 bp, synthetic construct
  source 1..21: mol_type = other DNA
gttgctgcctctttgggtttg

SEQ ID NO: 629 - DNA, 21 bp, synthetic construct
  source 1..21: mol_type = other DNA
ggtttgggggcagattcaggt

SEQ ID NO: 630 - DNA, 21 bp, synthetic construct
  source 1..21: mol_type = other DNA
ggggcagattcaggtctgagt

SEQ ID NO: 631 - DNA, 20 bp, synthetic construct
  source 1..20: mol_type = other DNA
tctgcagaaatgttccccgt

SEQ ID NO: 632 - DNA, 20 bp, synthetic construct
  source 1..20: mol_type = other DNA
tgcagagaaaggtggctcta

SEQ ID NO: 633 - DNA, 20 bp, synthetic construct
  source 1..20: mol_type = other DNA
taatgctgacttggggtggc

SEQ ID NO: 634 - DNA, 20 bp, synthetic construct
  source 1..20: mol_type = other DNA
taggacctccaggaagattc

SEQ ID NO: 635 - DNA, 20 bp, synthetic construct
  source 1..20: mol_type = other DNA
tagtcaacgcgaccaccacg

SEQ ID NO: 636 - DNA, 20 bp, synthetic construct
  source 1..20: mol_type = other DNA
tcctgaggtcaccttccaca

SEQ ID NO: 637 - DNA, 20 bp, synthetic construct
  source 1..20: mol_type = other DNA
tattgtgcctgtcatcattc

SEQ ID NO: 638 - DNA, 21 bp, synthetic construct
  source 1..21: mol_type = other DNA
tgacaggcacaatagaaacaa

SEQ ID NO: 639 - DNA, 21 bp, synthetic construct
  source 1..21: mol_type = other DNA
gacaggcacaatagaaacaac

SEQ ID NO: 640 - DNA, 21 bp, synthetic construct
  source 1..21: mol_type = other DNA
aaacaacggggaacatttctg

SEQ ID NO: 641 - DNA, 21 bp, synthetic construct
  source 1..21: mol_type = other DNA
acaacggggaacatttctgca

SEQ ID NO: 642 - DNA, 21 bp, synthetic construct
  source 1..21: mol_type = other DNA
tgatagagccacctttctctg

SEQ ID NO: 643 - DNA, 21 bp, synthetic construct
  source 1..21: mol_type = other DNA
gggtcacttgtgccgtggtgg

SEQ ID NO: 644 - DNA, 21 bp, synthetic construct
  source 1..21: mol_type = other DNA
ggcacaagtgacccaggtcaa

SEQ ID NO: 645 - DNA, 21 bp, synthetic construct
  source 1..21: mol_type = other DNA
gtcctgctgctcccagttgac

SEQ ID NO: 646 - DNA, 21 bp, synthetic construct
  source 1..21: mol_type = other DNA
tggccatttgtaatgctgact

SEQ ID NO: 647 - DNA, 21 bp, synthetic construct
  source 1..21: mol_type = other DNA
tggcacatctccccatccttc

SEQ ID NO: 648 - DNA, 21 bp, synthetic construct
  source 1..21: mol_type = other DNA
catctccccatccttcaagga

SEQ ID NO: 649 - DNA, 21 bp, synthetic construct
  source 1..21: mol_type = other DNA
ccactcgatccttgaaggatg

SEQ ID NO: 650 - DNA, 21 bp, synthetic construct
  source 1..21: mol_type = other DNA
ggccactcgatccttgaagga

SEQ ID NO: 651 - DNA, 21 bp, synthetic construct
  source 1..21: mol_type = other DNA
cctggggccactcgatccttg

SEQ ID NO: 652 - DNA, 21 bp, synthetic construct
  source 1..21: mol_type = other DNA
gactggagggtgaggcccagg

SEQ ID NO: 653 - DNA, 21 bp, synthetic construct
  source 1..21: mol_type = other DNA
atcgttcacggtcagcgactg

SEQ ID NO: 654 - DNA, 21 bp, synthetic construct
  source 1..21: mol_type = other DNA
gtcgctgaccgtgaacgatac

SEQ ID NO: 655 - DNA, 21 bp, synthetic construct
  source 1..21: mol_type = other DNA
cgctgaccgtgaacgatacag

SEQ ID NO: 656 - DNA, 21 bp, synthetic construct
  source 1..21: mol_type = other DNA
gcatctatcacacctaccctg

SEQ ID NO: 657 - DNA, 21 bp, synthetic construct
  source 1..21: mol_type = other DNA
cctaccctgatgggacgtaca

SEQ ID NO: 658 - DNA, 21 bp, synthetic construct
  source 1..21: mol_type = other DNA
taccctgatgggacgtacact

SEQ ID NO: 659 - DNA, 21 bp, synthetic construct
  source 1..21: mol_type = other DNA
ccctgatgggacgtacactgg

SEQ ID NO: 660 - DNA, 21 bp, synthetic construct
  source 1..21: mol_type = other DNA
ttctcccagtgtacgtcccat

SEQ ID NO: 661 - DNA, 21 bp, synthetic construct
  source 1..21: mol_type = other DNA
ggagaatcttcctggaggtcc

SEQ ID NO: 662 - DNA, 21 bp, synthetic construct
  source 1..21: mol_type = other DNA
catggctccaagcaatggaat

SEQ ID NO: 663 - DNA, 21 bp, synthetic construct
  source 1..21: mol_type = other DNA
cgcggccatggctccaagcaa

SEQ ID NO: 664 - DNA, 21 bp, synthetic construct
  source 1..21: mol_type = other DNA
tcgcggccatggctccaagca

SEQ ID NO: 665 - DNA, 21 bp, synthetic construct
  source 1..21: mol_type = other DNA
catcgtggtggtcgcgttgac

SEQ ID NO: 666 - DNA, 21 bp, synthetic construct
  source 1..21: mol_type = other DNA
aaagccctcagaatccattct

SEQ ID NO: 667 - DNA, 21 bp, synthetic construct
  source 1..21: mol_type = other DNA
cattctgtggaaggtgacctc

SEQ ID NO: 668 - DNA, 21 bp, synthetic construct
  source 1..21: mol_type = other DNA
ttctgtggaaggtgacctcag

SEQ ID NO: 669 - DNA, 21 bp, synthetic construct
  source 1..21: mol_type = other DNA
cctgaggtcaccttccacaga

SEQ ID NO: 670 - DNA, 21 bp, synthetic construct
  source 1..21: mol_type = other DNA
ttctcctgaggtcaccttcca

SEQ ID NO: 671 - DNA, 21 bp, synthetic construct
  source 1..21: mol_type = other DNA
aggagaaaatcagctggacag

SEQ ID NO: 672 - DNA, 21 bp, synthetic construct
  source 1..21: mol_type = other DNA
ggagaaaatcagctggacagg

SEQ ID NO: 673 - DNA, 21 bp, synthetic construct
  source 1..21: mol_type = other DNA
gccccagtgctccctcacccc

SEQ ID NO: 674 - DNA, 21 bp, synthetic construct
  source 1..21: mol_type = other DNA
tggacacagcttcctgggggt

SEQ ID NO: 675 - DNA, 21 bp, synthetic construct
  source 1..21: mol_type = other DNA
tctgcctggacacagcttcct

SEQ ID NO: 676 - DNA, 21 bp, synthetic construct
  source 1..21: mol_type = other DNA
agctgcacctgctgggctctg

SEQ ID NO: 677 - DNA, 21 bp, synthetic construct
  source 1..21: mol_type = other DNA
gctgggctctgtggagagcag

SEQ ID NO: 678 - DNA, 21 bp, synthetic construct
  source 1..21: mol_type = other DNA
tgggctctgtggagagcagcg

SEQ ID NO: 679 - DNA, 21 bp, synthetic construct
  source 1..21: mol_type = other DNA
ctgcatgactacttcaatgtc

SEQ ID NO: 680 - DNA, 21 bp, synthetic construct
  source 1..21: mol_type = other DNA
aatgtcctgagttacagaagc

SEQ ID NO: 681 - DNA, 21 bp, synthetic construct
  source 1..21: mol_type = other DNA
tgggtaactgcagcttcttca

SEQ ID NO: 682 - DNA, 20 bp, synthetic construct
  source 1..20: mol_type = other DNA
gacaggcacaatagaaacaa

SEQ ID NO: 683 - DNA, 20 bp, synthetic construct
  source 1..20: mol_type = other DNA
acaggcacaatagaaacaac

SEQ ID NO: 684 - DNA, 20 bp, synthetic construct
  source 1..20: mol_type = other DNA
caggcacaatagaaacaacg

SEQ ID NO: 685 - DNA, 20 bp, synthetic construct
  source 1..20: mol_type = other DNA
gggaacatttctgcagagaa

SEQ ID NO: 686 - DNA, 20 bp, synthetic construct
  source 1..20: mol_type = other DNA
aacatttctgcagagaaagg

SEQ ID NO: 687 - DNA, 20 bp, synthetic construct
  source 1..20: mol_type = other DNA
atgtcacctctcctccacca

SEQ ID NO: 688 - DNA, 20 bp, synthetic construct
  source 1..20: mol_type = other DNA
cttgtgccgtggtggaggag

SEQ ID NO: 689 - DNA, 20 bp, synthetic construct
  source 1..20: mol_type = other DNA
ggtcacttgtgccgtggtgg

SEQ ID NO: 690 - DNA, 20 bp, synthetic construct
  source 1..20: mol_type = other DNA
caccacggcacaagtgaccc

SEQ ID NO: 691 - DNA, 20 bp, synthetic construct
  source 1..20: mol_type = other DNA
ctgggtcacttgtgccgtgg

SEQ ID NO: 692 - DNA, 20 bp, synthetic construct
  source 1..20: mol_type = other DNA
gacctgggtcacttgtgccg

SEQ ID NO: 693 - DNA, 20 bp, synthetic construct
  source 1..20: mol_type = other DNA
cacaagtgacccaggtcaac

SEQ ID NO: 694 - DNA, 20 bp, synthetic construct
  source 1..20: mol_type = other DNA
acaagtgacccaggtcaact

SEQ ID NO: 695 - DNA, 20 bp, synthetic construct
  source 1..20: mol_type = other DNA
ccaggtcaactgggagcagc

SEQ ID NO: 696 - DNA, 20 bp, synthetic construct
  source 1..20: mol_type = other DNA
ctgctgctcccagttgacct

SEQ ID NO: 697 - DNA, 20 bp, synthetic construct
  source 1..20: mol_type = other DNA
cctgctgctcccagttgacc

SEQ ID NO: 698 - DNA, 20 bp, synthetic construct
  source 1..20: mol_type = other DNA
ggagcagcaggaccagcttc

SEQ ID NO: 699 - DNA, 20 bp, synthetic construct
  source 1..20: mol_type = other DNA
cattacaaatggccagaagc

SEQ ID NO: 700 - DNA, 20 bp, synthetic construct
  source 1..20: mol_type = other DNA
ggccatttgtaatgctgact

SEQ ID NO: 701 - DNA, 20 bp, synthetic construct
  source 1..20: mol_type = other DNA
gccatttgtaatgctgactt

SEQ ID NO: 702 - DNA, 20 bp, synthetic construct
  source 1..20: mol_type = other DNA
ccatttgtaatgctgacttg

SEQ ID NO: 703 - DNA, 20 bp, synthetic construct
  source 1..20: mol_type = other DNA
tttgtaatgctgacttgggg

SEQ ID NO: 704 - DNA, 20 bp, synthetic construct
  source 1..20: mol_type = other DNA
ccccaagtcagcattacaaa

SEQ ID NO: 705 - DNA, 20 bp, synthetic construct
  source 1..20: mol_type = other DNA
gcacatctccccatccttca

SEQ ID NO: 706 - DNA, 20 bp, synthetic construct
  source 1..20: mol_type = other DNA
cccatccttcaaggatcgag

SEQ ID NO: 707 - DNA, 20 bp, synthetic construct
  source 1..20: mol_type = other DNA
cactcgatccttgaaggatg

SEQ ID NO: 708 - DNA, 20 bp, synthetic construct
  source 1..20: mol_type = other DNA
ccactcgatccttgaaggat

SEQ ID NO: 709 - DNA, 20 bp, synthetic construct
  source 1..20: mol_type = other DNA
gccactcgatccttgaagga

SEQ ID NO: 710 - DNA, 20 bp, synthetic construct
  source 1..20: mol_type = other DNA
ttcaaggatcgagtggcccc

SEQ ID NO: 711 - DNA, 20 bp, synthetic construct
  source 1..20: mol_type = other DNA
tggggccactcgatccttga

SEQ ID NO: 712 - DNA, 20 bp, synthetic construct
  source 1..20: mol_type = other DNA
gatcgagtggccccaggtcc

SEQ ID NO: 713 - DNA, 20 bp, synthetic construct
  source 1..20: mol_type = other DNA
agtggccccaggtcccggcc

SEQ ID NO: 714 - DNA, 20 bp, synthetic construct
  source 1..20: mol_type = other DNA
gtggccccaggtcccggcct

SEQ ID NO: 715 - DNA, 20 bp, synthetic construct
  source 1..20: mol_type = other DNA
gaggcccaggccgggacctg

SEQ ID NO: 716 - DNA, 20 bp, synthetic construct
  source 1..20: mol_type = other DNA
tgaggcccaggccgggacct

SEQ ID NO: 717 - DNA, 20 bp, synthetic construct
  source 1..20: mol_type = other DNA
gtgaggcccaggccgggacc

SEQ ID NO: 718 - DNA, 20 bp, synthetic construct
  source 1..20: mol_type = other DNA
tggagggtgaggcccaggcc

SEQ ID NO: 719 - DNA, 20 bp, synthetic construct
  source 1..20: mol_type = other DNA
ctggagggtgaggcccaggc

SEQ ID NO: 720 - DNA, 20 bp, synthetic construct
  source 1..20: mol_type = other DNA
gcgactggagggtgaggccc

SEQ ID NO: 721 - DNA, 20 bp, synthetic construct
  source 1..20: mol_type = other DNA
cggtcagcgactggagggtg

SEQ ID NO: 722 - DNA, 20 bp, synthetic construct
  source 1..20: mol_type = other DNA
gttcacggtcagcgactgga

SEQ ID NO: 723 - DNA, 20 bp, synthetic construct
  source 1..20: mol_type = other DNA
cgttcacggtcagcgactgg

SEQ ID NO: 724 - DNA, 20 bp, synthetic construct
  source 1..20: mol_type = other DNA
tatcgttcacggtcagcgac

SEQ ID NO: 725 - DNA, 20 bp, synthetic construct
  source 1..20: mol_type = other DNA
tcgctgaccgtgaacgatac

SEQ ID NO: 726 - DNA, 20 bp, synthetic construct
  source 1..20: mol_type = other DNA
cgctgaccgtgaacgataca

SEQ ID NO: 727 - DNA, 20 bp, synthetic construct
  source 1..20: mol_type = other DNA
gctgaccgtgaacgatacag

SEQ ID NO: 728 - DNA, 20 bp, synthetic construct
  source 1..20: mol_type = other DNA
gtactcccctgtatcgttca

SEQ ID NO: 729 - DNA, 20 bp, synthetic construct
  source 1..20: mol_type = other DNA
atctatcacacctaccctga

SEQ ID NO: 730 - DNA, 20 bp, synthetic construct
  source 1..20: mol_type = other DNA
tctatcacacctaccctgat

SEQ ID NO: 731 - DNA, 20 bp, synthetic construct
  source 1..20: mol_type = other DNA
taccctgatgggacgtacac

SEQ ID NO: 732 - DNA, 20 bp, synthetic construct
  source 1..20: mol_type = other DNA
accctgatgggacgtacact

SEQ ID NO: 733 - DNA, 20 bp, synthetic construct
  source 1..20: mol_type = other DNA
agtgtacgtcccatcagggt

SEQ ID NO: 734 - DNA, 20 bp, synthetic construct
  source 1..20: mol_type = other DNA
tcccagtgtacgtcccatca

SEQ ID NO: 735 - DNA, 20 bp, synthetic construct
  source 1..20: mol_type = other DNA
ctcccagtgtacgtcccatc

SEQ ID NO: 736 - DNA, 20 bp, synthetic construct
  source 1..20: mol_type = other DNA
gtacactgggagaatcttcc

SEQ ID NO: 737 - DNA, 20 bp, synthetic construct
  source 1..20: mol_type = other DNA
cactgggagaatcttcctgg

SEQ ID NO: 738 - DNA, 20 bp, synthetic construct
  source 1..20: mol_type = other DNA
ctgagctttctaggacctcc

SEQ ID NO: 739 - DNA, 20 bp, synthetic construct
  source 1..20: mol_type = other DNA
aggttccagattccattgct

SEQ ID NO: 740 - DNA, 20 bp, synthetic construct
  source 1..20: mol_type = other DNA
aagcaatggaatctggaacc

SEQ ID NO: 741 - DNA, 20 bp, synthetic construct
  source 1..20: mol_type = other DNA
gattccattgcttggagcca

SEQ ID NO: 742 - DNA, 20 bp, synthetic construct
  source 1..20: mol_type = other DNA
tggctccaagcaatggaatc

SEQ ID NO: 743 - DNA, 20 bp, synthetic construct
  source 1..20: mol_type = other DNA
gcggccatggctccaagcaa

SEQ ID NO: 744 - DNA, 20 bp, synthetic construct
  source 1..20: mol_type = other DNA
tggagccatggccgcgacgc

SEQ ID NO: 745 - DNA, 20 bp, synthetic construct
  source 1..20: mol_type = other DNA
agccatggccgcgacgctgg

SEQ ID NO: 746 - DNA, 20 bp, synthetic construct
  source 1..20: mol_type = other DNA
gaccaccagcgtcgcggcca

SEQ ID NO: 747 - DNA, 20 bp, synthetic construct
  source 1..20: mol_type = other DNA
gcagatgaccaccagcgtcg

SEQ ID NO: 748 - DNA, 20 bp, synthetic construct
  source 1..20: mol_type = other DNA
catctgcacagcagtcatcg

SEQ ID NO: 749 - DNA, 20 bp, synthetic construct
  source 1..20: mol_type = other DNA
ctgcacagcagtcatcgtgg

SEQ ID NO: 750 - DNA, 20 bp, synthetic construct
  source 1..20: mol_type = other DNA
agccctcagaatccattctg

SEQ ID NO: 751 - DNA, 20 bp, synthetic construct
  source 1..20: mol_type = other DNA
ctcagaatccattctgtgga

SEQ ID NO: 752 - DNA, 20 bp, synthetic construct
  source 1..20: mol_type = other DNA
ttccacagaatggattctga

SEQ ID NO: 753 - DNA, 20 bp, synthetic construct
  source 1..20: mol_type = other DNA
cttccacagaatggattctg

SEQ ID NO: 754 - DNA, 20 bp, synthetic construct
  source 1..20: mol_type = other DNA
attctgtggaaggtgacctc

SEQ ID NO: 755 - DNA, 20 bp, synthetic construct
  source 1..20: mol_type = other DNA
tgaggtcaccttccacagaa

SEQ ID NO: 756 - DNA, 20 bp, synthetic construct
  source 1..20: mol_type = other DNA
gacctcaggagaaaatcagc

SEQ ID NO: 757 - DNA, 20 bp, synthetic construct
  source 1..20: mol_type = other DNA
caggagaaaatcagctggac

SEQ ID NO: 758 - DNA, 20 bp, synthetic construct
  source 1..20: mol_type = other DNA
gtccagctgattttctcctg

SEQ ID NO: 759 - DNA, 20 bp, synthetic construct
  source 1..20: mol_type = other DNA
gagaaaatcagctggacagg

SEQ ID NO: 760 - DNA, 20 bp, synthetic construct
  source 1..20: mol_type = other DNA
aatcagctggacaggaggaa

SEQ ID NO: 761 - DNA, 20 bp, synthetic construct
  source 1..20: mol_type = other DNA
cccagtgctccctcaccccc

SEQ ID NO: 762 - DNA, 20 bp, synthetic construct
  source 1..20: mol_type = other DNA
ctgggggtgagggagcactg

SEQ ID NO: 763 - DNA, 20 bp, synthetic construct
  source 1..20: mol_type = other DNA
cctgggggtgagggagcact

SEQ ID NO: 764 - DNA, 20 bp, synthetic construct
  source 1..20: mol_type = other DNA
tcctgggggtgagggagcac

SEQ ID NO: 765 - DNA, 20 bp, synthetic construct
  source 1..20: mol_type = other DNA
acacagcttcctgggggtga

SEQ ID NO: 766 - DNA, 20 bp, synthetic construct
  source 1..20: mol_type = other DNA
gacacagcttcctgggggtg

SEQ ID NO: 767 - DNA, 20 bp, synthetic construct
  source 1..20: mol_type = other DNA
acccccaggaagctgtgtcc

SEQ ID NO: 768 - DNA, 20 bp, synthetic construct
  source 1..20: mol_type = other DNA
gcctggacacagcttcctgg

SEQ ID NO: 769 - DNA, 20 bp, synthetic construct
  source 1..20: mol_type = other DNA
tgcctggacacagcttcctg

SEQ ID NO: 770 - DNA, 20 bp, synthetic construct
  source 1..20: mol_type = other DNA
ctgcctggacacagcttcct

SEQ ID NO: 771 - DNA, 20 bp, synthetic construct
  source 1..20: mol_type = other DNA
tctgcctggacacagcttcc

SEQ ID NO: 772 - DNA, 20 bp, synthetic construct
  source 1..20: mol_type = other DNA
caggcagaagctgcacctgc

SEQ ID NO: 773 - DNA, 20 bp, synthetic construct
  source 1..20: mol_type = other DNA
aggcagaagctgcacctgct

SEQ ID NO: 774 - DNA, 20 bp, synthetic construct
  source 1..20: mol_type = other DNA
cagcaggtgcagcttctgcc

SEQ ID NO: 775 - DNA, 20 bp, synthetic construct
  source 1..20: mol_type = other DNA
gctgcacctgctgggctctg

SEQ ID NO: 776 - DNA, 20 bp, synthetic construct
  source 1..20: mol_type = other DNA
tgctctccacagagcccagc

SEQ ID NO: 777 - DNA, 20 bp, synthetic construct
  source 1..20: mol_type = other DNA
ctgggctctgtggagagcag

SEQ ID NO: 778 - DNA, 20 bp, synthetic construct
  source 1..20: mol_type = other DNA
tgggctctgtggagagcagc

SEQ ID NO: 779 - DNA, 20 bp, synthetic construct
  source 1..20: mol_type = other DNA
gggctctgtggagagcagcg

SEQ ID NO: 780 - DNA, 20 bp, synthetic construct
  source 1..20: mol_type = other DNA
ctgtggagagcagcggggag

SEQ ID NO: 781 - DNA, 20 bp, synthetic construct
  source 1..20: mol_type = other DNA
attgaagtagtcatgcagct

SEQ ID NO: 782 - DNA, 20 bp, synthetic construct
  source 1..20: mol_type = other DNA
tgtcctgagttacagaagcc

SEQ ID NO: 783 - DNA, 20 bp, synthetic construct
  source 1..20: mol_type = other DNA
gtcctgagttacagaagcct

SEQ ID NO: 784 - DNA, 20 bp, synthetic construct
  source 1..20: mol_type = other DNA
tacccaggcttctgtaactc

SEQ ID NO: 785 - DNA, 20 bp, synthetic construct
  source 1..20: mol_type = other DNA
tgaagaagctgcagttaccc

SEQ ID NO: 786 - DNA, 20 bp, synthetic construct
  source 1..20: mol_type = other DNA
tgcagcttcttcacagagac

SEQ ID NO: 787 - DNA, 20 bp, synthetic construct
  source 1..20: mol_type = other DNA
gttgtttctattgtgcctgt

SEQ ID NO: 788 - DNA, 20 bp, synthetic construct
  source 1..20: mol_type = other DNA
cgttgtttctattgtgcctg

SEQ ID NO: 789 - DNA, 20 bp, synthetic construct
  source 1..20: mol_type = other DNA
ccgttgtttctattgtgcct

SEQ ID NO: 790 - DNA, 20 bp, synthetic construct
  source 1..20: mol_type = other DNA
ccacggcacaagtgacccag

SEQ ID NO: 791 - DNA, 20 bp, synthetic construct
  source 1..20: mol_type = other DNA
agttgacctgggtcacttgt

SEQ ID NO: 792 - DNA, 20 bp, synthetic construct
  source 1..20: mol_type = other DNA
aagtcagcattacaaatggc

SEQ ID NO: 793 - DNA, 20 bp, synthetic construct
  source 1..20: mol_type = other DNA
catccttcaaggatcgagtg

SEQ ID NO: 794 - DNA, 20 bp, synthetic construct
  source 1..20: mol_type = other DNA
atccttcaaggatcgagtgg

SEQ ID NO: 795 - DNA, 20 bp, synthetic construct
  source 1..20: mol_type = other DNA
aggatcgagtggccccaggt

SEQ ID NO: 796 - DNA, 20 bp, synthetic construct
  source 1..20: mol_type = other DNA
aggtcccggcctgggcctca

SEQ ID NO: 797 - DNA, 20 bp, synthetic construct
  source 1..20: mol_type = other DNA
ggcctgggcctcaccctcca

SEQ ID NO: 798 - DNA, 20 bp, synthetic construct
  source 1..20: mol_type = other DNA
cggtcagcgactggagggtg

SEQ ID NO: 799 - DNA, 20 bp, synthetic construct
  source 1..20: mol_type = other DNA
gtcgctgaccgtgaacgata

SEQ ID NO: 800 - DNA, 20 bp, synthetic construct
  source 1..20: mol_type = other DNA
tgtatcgttcacggtcagcg

SEQ ID NO: 801 - DNA, 20 bp, synthetic construct
  source 1..20: mol_type = other DNA
ctgtatcgttcacggtcagc

SEQ ID NO: 802 - DNA, 20 bp, synthetic construct
  source 1..20: mol_type = other DNA
atcagggtaggtgtgataga

SEQ ID NO: 803 - DNA, 20 bp, synthetic construct
  source 1..20: mol_type = other DNA
agtgtacgtcccatcagggt

SEQ ID NO: 804 - DNA, 20 bp, synthetic construct
  source 1..20: mol_type = other DNA
ggaagattctcccagtgtac

SEQ ID NO: 805 - DNA, 20 bp, synthetic construct
  source 1..20: mol_type = other DNA
tggaggtcctagaaagctca

SEQ ID NO: 806 - DNA, 20 bp, synthetic construct
  source 1..20: mol_type = other DNA
agcaatggaatctggaacct

SEQ ID NO: 807 - DNA, 20 bp, synthetic construct
  source 1..20: mol_type = other DNA
agattccattgcttggagcc

SEQ ID NO: 808 - DNA, 20 bp, synthetic construct
  source 1..20: mol_type = other DNA
gattccattgcttggagcca

SEQ ID NO: 809 - DNA, 20 bp, synthetic construct
  source 1..20: mol_type = other DNA
attgcttggagccatggccg

SEQ ID NO: 810 - DNA, 20 bp, synthetic construct
  source 1..20: mol_type = other DNA
ttgcttggagccatggccgc

SEQ ID NO: 811 - DNA, 20 bp, synthetic construct
  source 1..20: mol_type = other DNA
cagaatggattctgagggct

SEQ ID NO: 812 - DNA, 20 bp, synthetic construct
  source 1..20: mol_type = other DNA
acagaatggattctgagggc

SEQ ID NO: 813 - DNA, 20 bp, synthetic construct
  source 1..20: mol_type = other DNA
ttctgtggaaggtgacctca

SEQ ID NO: 814 - DNA, 20 bp, synthetic construct
  source 1..20: mol_type = other DNA
gctgattttctcctgaggtc

SEQ ID NO: 815 - DNA, 20 bp, synthetic construct
  source 1..20: mol_type = other DNA
tcctgtccagctgattttct

SEQ ID NO: 816 - DNA, 20 bp, synthetic construct
  source 1..20: mol_type = other DNA
ttcctcctgtccagctgatt

SEQ ID NO: 817 - DNA, 20 bp, synthetic construct
  source 1..20: mol_type = other DNA
tgggggtgagggagcactgg

SEQ ID NO: 818 - DNA, 20 bp, synthetic construct
  source 1..20: mol_type = other DNA
agtgctccctcacccccagg

SEQ ID NO: 819 - DNA, 20 bp, synthetic construct
  source 1..20: mol_type = other DNA
tcacccccaggaagctgtgt

SEQ ID NO: 820 - DNA, 20 bp, synthetic construct
  source 1..20: mol_type = other DNA
caggaagctgtgtccaggca

SEQ ID NO: 821 - DNA, 20 bp, synthetic construct
  source 1..20: mol_type = other DNA
aggaagctgtgtccaggcag

SEQ ID NO: 822 - DNA, 20 bp, synthetic construct
  source 1..20: mol_type = other DNA
ggcagaagctgcacctgctg

SEQ ID NO: 823 - DNA, 20 bp, synthetic construct
  source 1..20: mol_type = other DNA
cagagcccagcaggtgcagc

SEQ ID NO: 824 - DNA, 20 bp, synthetic construct
  source 1..20: mol_type = other DNA
gctgctctccacagagccca

SEQ ID NO: 825 - DNA, 20 bp, synthetic construct
  source 1..20: mol_type = other DNA
cgctgctctccacagagccc

SEQ ID NO: 826 - DNA, 20 bp, synthetic construct
  source 1..20: mol_type = other DNA
atgtcctgagttacagaagc

SEQ ID NO: 827 - DNA, 20 bp, synthetic construct
  source 1..20: mol_type = other DNA
gagcacacccactgcgatgt

SEQ ID NO: 828 - DNA, 20 bp, synthetic construct
  source 1..20: mol_type = other DNA
gatggccaggagactgaaga

SEQ ID NO: 829 - DNA, 20 bp, synthetic construct
  source 1..20: mol_type = other DNA
ctgctcaccggagcgggatg

SEQ ID NO: 830 - DNA, 20 bp, synthetic construct
  source 1..20: mol_type = other DNA
gtctgtggccatgcccatca

SEQ ID NO: 831 - DNA, 20 bp, synthetic construct
  source 1..20: mol_type = other DNA
tcaccggagcgggatgcgga

SEQ ID NO: 832 - DNA, 20 bp, synthetic construct
  source 1..20: mol_type = other DNA
gtggcaggcagcgcagaacc

SEQ ID NO: 833 - DNA, 20 bp, synthetic construct
  source 1..20: mol_type = other DNA
agcacaccagcacattgccc

SEQ ID NO: 834 - DNA, 20 bp, synthetic construct
  source 1..20: mol_type = other DNA
caggttgctgttgagccaca

SEQ ID NO: 835 - DNA, 20 bp, synthetic construct
  source 1..20: mol_type = other DNA
cttcattgcctgcttcgtcc

SEQ ID NO: 836 - DNA, 20 bp, synthetic construct
  source 1..20: mol_type = other DNA
gtacaccgaggagcccatga

SEQ ID NO: 837 - DNA, 20 bp, synthetic construct
  source 1..20: mol_type = other DNA
gatggcaatgtagcggtcaa

SEQ ID NO: 838 - DNA, 20 bp, synthetic construct
  source 1..20: mol_type = other DNA
ctcctcggtgtacatcacgg

SEQ ID NO: 839 - DNA, 20 bp, synthetic construct
  source 1..20: mol_type = other DNA
cgaggagcccatgatgggca

SEQ ID NO: 840 - DNA, 20 bp, synthetic construct
  source 1..20: mol_type = other DNA
gggctcctcggtgtacatca

SEQ ID NO: 841 - DNA, 20 bp, synthetic construct
  source 1..20: mol_type = other DNA
ctttgtggtgtcactggcgg

SEQ ID NO: 842 - DNA, 20 bp, synthetic construct
  source 1..20: mol_type = other DNA
ccgctccggtgagcagggcc

SEQ ID NO: 843 - DNA, 20 bp, synthetic construct
  source 1..20: mol_type = other DNA
gggttctgcgctgcctgcca

SEQ ID NO: 844 - DNA, 20 bp, synthetic construct
  source 1..20: mol_type = other DNA
ggacgaagcaggcaatgaag

SEQ ID NO: 845 - DNA, 20 bp, synthetic construct
  source 1..20: mol_type = other DNA
gtgctgatggtgatggcaaa

SEQ ID NO: 846 - DNA, 20 bp, synthetic construct
  source 1..20: mol_type = other DNA
agcgcagaacccggtgctga

SEQ ID NO: 847 - DNA, 20 bp, synthetic construct
  source 1..20: mol_type = other DNA
gagctccatcttcagtctcc

SEQ ID NO: 848 - DNA, 20 bp, synthetic construct
  source 1..20: mol_type = other DNA
tgctgatggtgatggcaaag

SEQ ID NO: 849 - DNA, 20 bp, synthetic construct
  source 1..20: mol_type = other DNA
ggcggcggccgacatcgcag

SEQ ID NO: 850 - DNA, 20 bp, synthetic construct
  source 1..20: mol_type = other DNA
aatgaagaggcagccgtggc

SEQ ID NO: 851 - DNA, 20 bp, synthetic construct
  source 1..20: mol_type = other DNA
gggcaatgtgctggtgtgct

SEQ ID NO: 852 - DNA, 20 bp, synthetic construct
  source 1..20: mol_type = other DNA
catgcccatcatgggctcct

SEQ ID NO: 853 - DNA, 20 bp, synthetic construct
  source 1..20: mol_type = other DNA
aatgtagcggtcaatggcga

SEQ ID NO: 854 - DNA, 20 bp, synthetic construct
  source 1..20: mol_type = other DNA
agtagttggtgacgttctgc

SEQ ID NO: 855 - DNA, 20 bp, synthetic construct
  source 1..20: mol_type = other DNA
agcggtcaatggcgatggcc

SEQ ID NO: 856 - DNA, 20 bp, synthetic construct
  source 1..20: mol_type = other DNA
cgcatcccgctccggtgagc

SEQ ID NO: 857 - DNA, 20 bp, synthetic construct
  source 1..20: mol_type = other DNA
gcatcccgctccggtgagca

SEQ ID NO: 858 - DNA, 20 bp, synthetic construct
  source 1..20: mol_type = other DNA
tgggcaatgtgctggtgtgc

SEQ ID NO: 859 - DNA, 20 bp, synthetic construct
  source 1..20: mol_type = other DNA
caactactttgtggtgtcac

SEQ ID NO: 860 - DNA, 20 bp, synthetic construct
  source 1..20: mol_type = other DNA
cgctccggtgagcagggccg

SEQ ID NO: 861 - DNA, 20 bp, synthetic construct
  source 1..20: mol_type = other DNA
gatggtgatggcaaagggga

SEQ ID NO: 862 - DNA, 20 bp, synthetic construct
  source 1..20: mol_type = other DNA
ggtgtacatcacggtggagc

SEQ ID NO: 863 - DNA, 20 bp, synthetic construct
  source 1..20: mol_type = other DNA
gaacgtcaccaactactttg

SEQ ID NO: 864 - DNA, 20 bp, synthetic construct
  source 1..20: mol_type = other DNA
cagtgacaccacaaagtagt

SEQ ID NO: 865 - DNA, 20 bp, synthetic construct
  source 1..20: mol_type = other DNA
ggccatcctgggcaatgtgc

SEQ ID NO: 866 - DNA, 20 bp, synthetic construct
  source 1..20: mol_type = other DNA
cccggccctgctcaccggag

SEQ ID NO: 867 - DNA, 20 bp, synthetic construct
  source 1..20: mol_type = other DNA
caccagcacattgcccagga

SEQ ID NO: 868 - DNA, 20 bp, synthetic construct
  source 1..20: mol_type = other DNA
tttgccatcaccatcagcac

SEQ ID NO: 869 - DNA, 20 bp, synthetic construct
  source 1..20: mol_type = other DNA
ctccaccgtgatgtacaccg

SEQ ID NO: 870 - DNA, 20 bp, synthetic construct
  source 1..20: mol_type = other DNA
ggagctggccattgctgtgc

SEQ ID NO: 871 - DNA, 20 bp, synthetic construct
  source 1..20: mol_type = other DNA
caggatggccagcacagcaa

SEQ ID NO: 872 - DNA, 20 bp, synthetic construct
  source 1..20: mol_type = other DNA
gaacccggtgctgatggtga

SEQ ID NO: 873 - DNA, 20 bp, synthetic construct
  source 1..20: mol_type = other DNA
tggagctctgcgtgaggacc

SEQ ID NO: 874 - DNA, 20 bp, synthetic construct
  source 1..20: mol_type = other DNA
cccgctccggtgagcagggc

SEQ ID NO: 875 - DNA, 20 bp, synthetic construct
  source 1..20: mol_type = other DNA
aggcaatgaagaggcagccg

SEQ ID NO: 876 - DNA, 20 bp, synthetic construct
  source 1..20: mol_type = other DNA
ccggccctgctcaccggagc

SEQ ID NO: 877 - DNA, 20 bp, synthetic construct
  source 1..20: mol_type = other DNA
gcggcggccgacatcgcagt

SEQ ID NO: 878 - DNA, 20 bp, synthetic construct
  source 1..20: mol_type = other DNA
ggtgctgatggtgatggcaa

SEQ ID NO: 879 - DNA, 20 bp, synthetic construct
  source 1..20: mol_type = other DNA
ctactttgtggtgtcactgg

SEQ ID NO: 880 - DNA, 20 bp, synthetic construct
  source 1..20: mol_type = other DNA
tacaccgaggagcccatgat

SEQ ID NO: 881 - DNA, 20 bp, synthetic construct
  source 1..20: mol_type = other DNA
tctgtggccatgcccatcat

SEQ ID NO: 882 - DNA, 20 bp, synthetic construct
  source 1..20: mol_type = other DNA
attgctgtgctggccatcct

SEQ ID NO: 883 - DNA, 20 bp, synthetic construct
  source 1..20: mol_type = other DNA
cgtgaggaccaggacgaagc

SEQ ID NO: 884 - DNA, 20 bp, synthetic construct
  source 1..20: mol_type = other DNA
ttgccatcaccatcagcacc

SEQ ID NO: 885 - DNA, 20 bp, synthetic construct
  source 1..20: mol_type = other DNA
ggatgcggatggcaatgtag

SEQ ID NO: 886 - DNA, 20 bp, synthetic construct
  source 1..20: mol_type = other DNA
ttgccatccgcatcccgctc

SEQ ID NO: 887 - DNA, 20 bp, synthetic construct
  source 1..20: mol_type = other DNA
tgaagatggagctctgcgtg

SEQ ID NO: 888 - DNA, 20 bp, synthetic construct
  source 1..20: mol_type = other DNA
cattgctgtgctggccatcc

SEQ ID NO: 889 - DNA, 20 bp, synthetic construct
  source 1..20: mol_type = other DNA
tgctggtgtgctgggccgtg

SEQ ID NO: 890 - DNA, 21 bp, synthetic construct
  source 1..21: mol_type = other DNA
ggctcctcggtgtacatcacg

SEQ ID NO: 891 - DNA, 21 bp, synthetic construct
  source 1..21: mol_type = other DNA
gagctctgcgtgaggaccagg

SEQ ID NO: 892 - DNA, 21 bp, synthetic construct
  source 1..21: mol_type = other DNA
gatggagctctgcgtgaggac

SEQ ID NO: 893 - DNA, 21 bp, synthetic construct
  source 1..21: mol_type = other DNA
ccagcacaccagcacattgcc

SEQ ID NO: 894 - DNA, 21 bp, synthetic construct
  source 1..21: mol_type = other DNA
aggaccaggacgaagcaggca

SEQ ID NO: 895 - DNA, 21 bp, synthetic construct
  source 1..21: mol_type = other DNA
tgccatccgcatcccgctccg

SEQ ID NO: 896 - DNA, 21 bp, synthetic construct
  source 1..21: mol_type = other DNA
gtgtggctcaacagcaacctg

SEQ ID NO: 897 - DNA, 21 bp, synthetic construct
  source 1..21: mol_type = other DNA
agctccaccgtgatgtacacc

SEQ ID NO: 898 - DNA, 21 bp, synthetic construct
  source 1..21: mol_type = other DNA
gtagcggtcaatggcgatggc

SEQ ID NO: 899 - DNA, 21 bp, synthetic construct
  source 1..21: mol_type = other DNA
cggtgctgatggtgatggcaa

SEQ ID NO: 900 - DNA, 21 bp, synthetic construct
  source 1..21: mol_type = other DNA
ccctgctcaccggagcgggat

SEQ ID NO: 901 - DNA, 21 bp, synthetic construct
  source 1..21: mol_type = other DNA
gtgacgttctgcaggttgctg

SEQ ID NO: 902 - DNA, 21 bp, synthetic construct
  source 1..21: mol_type = other DNA
gctccaccgtgatgtacaccg

SEQ ID NO: 903 - DNA, 21 bp, synthetic construct
  source 1..21: mol_type = other DNA
actgaagatggagctctgcgt

SEQ ID NO: 904 - DNA, 21 bp, synthetic construct
  source 1..21: mol_type = other DNA
ccagctccaccgtgatgtaca

SEQ ID NO: 905 - DNA, 21 bp, synthetic construct
  source 1..21: mol_type = other DNA
cctttgccatcaccatcagca

SEQ ID NO: 906 - DNA, 21 bp, synthetic construct
  source 1..21: mol_type = other DNA
ccggtgctgatggtgatggca

SEQ ID NO: 907 - DNA, 21 bp, synthetic construct
  source 1..21: mol_type = other DNA
cctgggcaatgtgctggtgtg

SEQ ID NO: 908 - DNA, 21 bp, synthetic construct
  source 1..21: mol_type = other DNA
aggcagccgtggcaggcagcg

SEQ ID NO: 909 - DNA, 21 bp, synthetic construct
  source 1..21: mol_type = other DNA
gcgatggccaggagactgaag

SEQ ID NO: 910 - DNA, 21 bp, synthetic construct
  source 1..21: mol_type = other DNA
cgatggccaggagactgaaga

SEQ ID NO: 911 - DNA, 21 bp, synthetic construct
  source 1..21: mol_type = other DNA
tcccgctccggtgagcagggc

SEQ ID NO: 912 - DNA, 21 bp, synthetic construct
  source 1..21: mol_type = other DNA
tgcttcgtcctggtcctcacg

SEQ ID NO: 913 - DNA, 21 bp, synthetic construct
  source 1..21: mol_type = other DNA
accaggacgaagcaggcaatg

SEQ ID NO: 914 - DNA, 21 bp, synthetic construct
  source 1..21: mol_type = other DNA
atgtacaccgaggagcccatg

SEQ ID NO: 915 - DNA, 21 bp, synthetic construct
  source 1..21: mol_type = other DNA
tcgtctgtggccatgcccatc

SEQ ID NO: 916 - DNA, 21 bp, synthetic construct
  source 1..21: mol_type = other DNA
tcaatggcgatggccaggaga

SEQ ID NO: 917 - DNA, 21 bp, synthetic construct
  source 1..21: mol_type = other DNA
ggtgctgatggtgatggcaaa

SEQ ID NO: 918 - DNA, 21 bp, synthetic construct
  source 1..21: mol_type = other DNA
tagcggtcaatggcgatggcc

SEQ ID NO: 919 - DNA, 21 bp, synthetic construct
  source 1..21: mol_type = other DNA
tccgcatcccgctccggtgag

SEQ ID NO: 920 - DNA, 21 bp, synthetic construct
  source 1..21: mol_type = other DNA
ctggcggcggccgacatcgca

SEQ ID NO: 921 - DNA, 21 bp, synthetic construct
  source 1..21: mol_type = other DNA
gccattgctgtgctggccatc

SEQ ID NO: 922 - DNA, 21 bp, synthetic construct
  source 1..21: mol_type = other DNA
atcccgctccggtgagcaggg

SEQ ID NO: 923 - DNA, 21 bp, synthetic construct
  source 1..21: mol_type = other DNA
agactgaagatggagctctgc

SEQ ID NO: 924 - DNA, 21 bp, synthetic construct
  source 1..21: mol_type = other DNA
ccccggccctgctcaccggag

SEQ ID NO: 925 - DNA, 21 bp, synthetic construct
  source 1..21: mol_type = other DNA
atggtgatggcaaaggggatg

SEQ ID NO: 926 - DNA, 21 bp, synthetic construct
  source 1..21: mol_type = other DNA
gctcctcggtgtacatcacgg

SEQ ID NO: 927 - DNA, 20 bp, synthetic construct
  source 1..20: mol_type = other DNA
tgtcgatggcaatagccaag

SEQ ID NO: 928 - DNA, 20 bp, synthetic construct
  source 1..20: mol_type = other DNA
agaagttggtgacgttctgc

SEQ ID NO: 929 - DNA, 20 bp, synthetic construct
  source 1..20: mol_type = other DNA
ttcgccatcaccatcagcac

SEQ ID NO: 930 - DNA, 20 bp, synthetic construct
  source 1..20: mol_type = other DNA
gaagaagaggcagccatggc

SEQ ID NO: 931 - DNA, 20 bp, synthetic construct
  source 1..20: mol_type = other DNA
cacaagcacgttacccagga

SEQ ID NO: 932 - DNA, 20 bp, synthetic construct
  source 1..20: mol_type = other DNA
caacttcttcgtggtatctc

SEQ ID NO: 933 - DNA, 20 bp, synthetic construct
  source 1..20: mol_type = other DNA
caggatggccagcacagcaa

SEQ ID NO: 934 - DNA, 20 bp, synthetic construct
  source 1..20: mol_type = other DNA
aattccactccggtgagcca

SEQ ID NO: 935 - DNA, 20 bp, synthetic construct
  source 1..20: mol_type = other DNA
agcgcagaagccagtgctga

SEQ ID NO: 936 - DNA, 20 bp, synthetic construct
  source 1..20: mol_type = other DNA
gtgctgatggtgatggcgaa

SEQ ID NO: 937 - DNA, 20 bp, synthetic construct
  source 1..20: mol_type = other DNA
ggagctggccattgctgtgc

SEQ ID NO: 938 - DNA, 20 bp, synthetic construct
  source 1..20: mol_type = other DNA
aatagccaagaggctgaaga

SEQ ID NO: 939 - DNA, 20 bp, synthetic construct
  source 1..20: mol_type = other DNA
ctcctcggtgtacatcatgg

SEQ ID NO: 940 - DNA, 20 bp, synthetic construct
  source 1..20: mol_type = other DNA
ggacaaagcaggcgaagaag

SEQ ID NO: 941 - DNA, 20 bp, synthetic construct
  source 1..20: mol_type = other DNA
tctggcggcggctgacatcg

SEQ ID NO: 942 - DNA, 20 bp, synthetic construct
  source 1..20: mol_type = other DNA
tgggtaacgtgcttgtgtgc

SEQ ID NO: 943 - DNA, 20 bp, synthetic construct
  source 1..20: mol_type = other DNA
gatgtacaccgaggagccca

SEQ ID NO: 944 - DNA, 20 bp, synthetic construct
  source 1..20: mol_type = other DNA
taacccctggctcaccggag

SEQ ID NO: 945 - DNA, 20 bp, synthetic construct
  source 1..20: mol_type = other DNA
tcaccggagtggaattcgga

SEQ ID NO: 946 - DNA, 20 bp, synthetic construct
  source 1..20: mol_type = other DNA
gcggcggctgacatcgcggt

SEQ ID NO: 947 - DNA, 20 bp, synthetic construct
  source 1..20: mol_type = other DNA
gatggtgatggcgaatggga

SEQ ID NO: 948 - DNA, 20 bp, synthetic construct
  source 1..20: mol_type = other DNA
ggcttctgcgctgcctgcca

SEQ ID NO: 949 - DNA, 20 bp, synthetic construct
  source 1..20: mol_type = other DNA
attccactccggtgagccag

SEQ ID NO: 950 - DNA, 20 bp, synthetic construct
  source 1..20: mol_type = other DNA
ggtgtacatcatggtggagc

SEQ ID NO: 951 - DNA, 20 bp, synthetic construct
  source 1..20: mol_type = other DNA
attgctgtgctggccatcct

SEQ ID NO: 952 - DNA, 20 bp, synthetic construct
  source 1..20: mol_type = other DNA
ctccaccatgatgtacaccg

SEQ ID NO: 953 - DNA, 20 bp, synthetic construct
  source 1..20: mol_type = other DNA
ggcggcggctgacatcgcgg

SEQ ID NO: 954 - DNA, 20 bp, synthetic construct
  source 1..20: mol_type = other DNA
tacaccgaggagcccatggc

SEQ ID NO: 955 - DNA, 20 bp, synthetic construct
  source 1..20: mol_type = other DNA
gggtaacgtgcttgtgtgct

SEQ ID NO: 956 - DNA, 20 bp, synthetic construct
  source 1..20: mol_type = other DNA
caggttgctgttgatccaca

SEQ ID NO: 957 - DNA, 20 bp, synthetic construct
  source 1..20: mol_type = other DNA
tgaagatggaactctgcgtg

SEQ ID NO: 958 - DNA, 20 bp, synthetic construct
  source 1..20: mol_type = other DNA
gatggcgatgtatctgtcga

SEQ ID NO: 959 - DNA, 20 bp, synthetic construct
  source 1..20: mol_type = other DNA
cttcttcgcctgctttgtcc

SEQ ID NO: 960 - DNA, 20 bp, synthetic construct
  source 1..20: mol_type = other DNA
aggcgaagaagaggcagcca

SEQ ID NO: 961 - DNA, 20 bp, synthetic construct
  source 1..20: mol_type = other DNA
tgcttgtgtgctgggccgtg

SEQ ID NO: 962 - DNA, 20 bp, synthetic construct
  source 1..20: mol_type = other DNA
gaagccagtgctgatggtga

SEQ ID NO: 963 - DNA, 20 bp, synthetic construct
  source 1..20: mol_type = other DNA
cgtgaggaccaggacaaagc

SEQ ID NO: 964 - DNA, 20 bp, synthetic construct
  source 1..20: mol_type = other DNA
tggaactctgcgtgaggacc

SEQ ID NO: 965 - DNA, 20 bp, synthetic construct
  source 1..20: mol_type = other DNA
cattgctgtgctggccatcc

SEQ ID NO: 966 - DNA, 20 bp, synthetic construct
  source 1..20: mol_type = other DNA
ttctcccgccatgggctcct

SEQ ID NO: 967 - DNA, 20 bp, synthetic construct
  source 1..20: mol_type = other DNA
tggctcaccggagtggaatt

SEQ ID NO: 968 - DNA, 20 bp, synthetic construct
  source 1..20: mol_type = other DNA
tgctgatggtgatggcgaat

SEQ ID NO: 969 - DNA, 20 bp, synthetic construct
  source 1..20: mol_type = other DNA
cttcgtggtatctctggcgg

SEQ ID NO: 970 - DNA, 20 bp, synthetic construct
  source 1..20: mol_type = other DNA
agcacacaagcacgttaccc

SEQ ID NO: 971 - DNA, 20 bp, synthetic construct
  source 1..20: mol_type = other DNA
gggctcctcggtgtacatca

SEQ ID NO: 972 - DNA, 20 bp, synthetic construct
  source 1..20: mol_type = other DNA
gtacaccgaggagcccatgg

SEQ ID NO: 973 - DNA, 20 bp, synthetic construct
  source 1..20: mol_type = other DNA
gaacgtcaccaacttcttcg

SEQ ID NO: 974 - DNA, 20 bp, synthetic construct
  source 1..20: mol_type = other DNA
tcgccatccgaattccactc

SEQ ID NO: 975 - DNA, 20 bp, synthetic construct
  source 1..20: mol_type = other DNA
gagttccatcttcagcctct

SEQ ID NO: 976 - DNA, 20 bp, synthetic construct
  source 1..20: mol_type = other DNA
gaattccactccggtgagcc

SEQ ID NO: 977 - DNA, 20 bp, synthetic construct
  source 1..20: mol_type = other DNA
cagagataccacgaagaagt

SEQ ID NO: 978 - DNA, 20 bp, synthetic construct
  source 1..20: mol_type = other DNA
cttcttcgtggtatctctgg

SEQ ID NO: 979 - DNA, 21 bp, synthetic construct
  source 1..21: mol_type = other DNA
cagtgctgatggtgatggcga

SEQ ID NO: 980 - DNA, 21 bp, synthetic construct
  source 1..21: mol_type = other DNA
cgaattccactccggtgagcc

SEQ ID NO: 981 - DNA, 21 bp, synthetic construct
  source 1..21: mol_type = other DNA
ccgaattccactccggtgagc

SEQ ID NO: 982 - DNA, 21 bp, synthetic construct
  source 1..21: mol_type = other DNA
gctgaagatggaactctgcgt

SEQ ID NO: 983 - DNA, 21 bp, synthetic construct
  source 1..21: mol_type = other DNA
cgtgcttgtgtgctgggccgt

SEQ ID NO: 984 - DNA, 21 bp, synthetic construct
  source 1..21: mol_type = other DNA
gtgaggaccaggacaaagcag

SEQ ID NO: 985 - DNA, 21 bp, synthetic construct
  source 1..21: mol_type = other DNA
tcgatggcaatagccaagagg

SEQ ID NO: 986 - DNA, 21 bp, synthetic construct
  source 1..21: mol_type = other DNA
catcgacagatacatcgccat

SEQ ID NO: 987 - DNA, 21 bp, synthetic construct
  source 1..21: mol_type = other DNA
gtacaccgaggagcccatggc

SEQ ID NO: 988 - DNA, 21 bp, synthetic construct
  source 1..21: mol_type = other DNA
gctccaccatgatgtacaccg

SEQ ID NO: 989 - DNA, 21 bp, synthetic construct
  source 1..21: mol_type = other DNA
aagccagtgctgatggtgatg

SEQ ID NO: 990 - DNA, 21 bp, synthetic construct
  source 1..21: mol_type = other DNA
caccgcgatgtcagccgccgc

SEQ ID NO: 991 - DNA, 21 bp, synthetic construct
  source 1..21: mol_type = other DNA
aggctgaagatggaactctgc

SEQ ID NO: 992 - DNA, 21 bp, synthetic construct
  source 1..21: mol_type = other DNA
gccgccgccagagataccacg

SEQ ID NO: 993 - DNA, 21 bp, synthetic construct
  source 1..21: mol_type = other DNA
agctccaccatgatgtacacc

SEQ ID NO: 994 - DNA, 21 bp, synthetic construct
  source 1..21: mol_type = other DNA
aggcagccatggcaggcagcg

SEQ ID NO: 995 - DNA, 21 bp, synthetic construct
  source 1..21: mol_type = other DNA
cctggctcaccggagtggaat

SEQ ID NO: 996 - DNA, 21 bp, synthetic construct
  source 1..21: mol_type = other DNA
ccagctccaccatgatgtaca

SEQ ID NO: 997 - DNA, 21 bp, synthetic construct
  source 1..21: mol_type = other DNA
accaggacaaagcaggcgaag

SEQ ID NO: 998 - DNA, 21 bp, synthetic construct
  source 1..21: mol_type = other DNA
cctgggtaacgtgcttgtgtg

SEQ ID NO: 999 - DNA, 21 bp, synthetic construct
  source 1..21: mol_type = other DNA
aggaccaggacaaagcaggcg

SEQ ID NO: 1000 - DNA, 21 bp, synthetic construct
  source 1..21: mol_type = other DNA
tcagccgccgccagagatacc

SEQ ID NO: 1001 - DNA, 21 bp, synthetic construct
  source 1..21: mol_type = other DNA
ggctcctcggtgtacatcatg

SEQ ID NO: 1002 - DNA, 21 bp, synthetic construct
  source 1..21: mol_type = other DNA
ctggcggcggctgacatcgcg

SEQ ID NO: 1003 - DNA, 21 bp, synthetic construct
  source 1..21: mol_type = other DNA
gatggaactctgcgtgaggac

SEQ ID NO: 1004 - DNA, 21 bp, synthetic construct
  source 1..21: mol_type = other DNA
gctcctcggtgtacatcatgg

SEQ ID NO: 1005 - DNA, 21 bp, synthetic construct
  source 1..21: mol_type = other DNA
tgtacaccgaggagcccatgg

SEQ ID NO: 1006 - DNA, 21 bp, synthetic construct
  source 1..21: mol_type = other DNA
gccattgctgtgctggccatc

SEQ ID NO: 1007 - DNA, 21 bp, synthetic construct
  source 1..21: mol_type = other DNA
caatagccaagaggctgaaga

SEQ ID NO: 1008 - DNA, 21 bp, synthetic construct
  source 1..21: mol_type = other DNA
atggtgatggcgaatgggatg

SEQ ID NO: 1009 - DNA, 21 bp, synthetic construct
  source 1..21: mol_type = other DNA
atgtacaccgaggagcccatg

SEQ ID NO: 1010 - DNA, 21 bp, synthetic construct
  source 1..21: mol_type = other DNA
gtgtggatcaacagcaacctg

SEQ ID NO: 1011 - DNA, 21 bp, synthetic construct
  source 1..21: mol_type = other DNA
tgctttgtcctggtcctcacg

SEQ ID NO: 1012 - DNA, 21 bp, synthetic construct
  source 1..21: mol_type = other DNA
gtaacccctggctcaccggag

SEQ ID NO: 1013 - DNA, 21 bp, synthetic construct
  source 1..21: mol_type = other DNA
ccagcacacaagcacgttacc

SEQ ID NO: 1014 - DNA, 21 bp, synthetic construct
  source 1..21: mol_type = other DNA
tatctgtcgatggcaatagcc

SEQ ID NO: 1015 - DNA, 21 bp, synthetic construct
  source 1..21: mol_type = other DNA
gcaatagccaagaggctgaag

SEQ ID NO: 1016 - DNA, 21 bp, synthetic construct
  source 1..21: mol_type = other DNA
agtgctgatggtgatggcgaa

SEQ ID NO: 1017 - DNA, 21 bp, synthetic construct
  source 1..21: mol_type = other DNA
acaccgaggagcccatggcgg

SEQ ID NO: 1018 - DNA, 21 bp, synthetic construct
  source 1..21: mol_type = other DNA
cgccatccgaattccactccg

SEQ ID NO: 1019 - DNA, 20 bp, synthetic construct
  source 1..20: mol_type = other DNA
tggtgtcactggcggcggcc

SEQ ID NO: 1020 - DNA, 20 bp, synthetic construct
  source 1..20: mol_type = other DNA
ccatcaccatcagcaccggg

SEQ ID NO: 1021 - DNA, 20 bp, synthetic construct
  source 1..20: mol_type = other DNA
ccatcggcctgactcccatg

SEQ ID NO: 1022 - DNA, 20 bp, synthetic construct
  source 1..20: mol_type = other DNA
gctgaccgcagttgttccaa

SEQ ID NO: 1023 - DNA, 20 bp, synthetic construct
  source 1..20: mol_type = other DNA
aggatgtggtccccatgaac

SEQ ID NO: 1024 - DNA, 20 bp, synthetic construct
  source 1..20: mol_type = other DNA
cctgtgtgctggtgcccctg

SEQ ID NO: 1025 - DNA, 20 bp, synthetic construct
  source 1..20: mol_type = other DNA
cggatcttcctggcggcgcg

SEQ ID NO: 1026 - DNA, 20 bp, synthetic construct
  source 1..20: mol_type = other DNA
ccctctgctggctgccccta

SEQ ID NO: 1027 - DNA, 20 bp, synthetic construct
  source 1..20: mol_type = other DNA
ttctgccccgactgcagcca

SEQ ID NO: 1028 - DNA, 20 bp, synthetic construct
  source 1..20: mol_type = other DNA
aaggcagctggcaccagtgc

SEQ ID NO: 1029 - DNA, 21 bp, synthetic construct
  source 1..21: mol_type = other DNA
taagggcatcattgccatctg

SEQ ID NO: 1030 - DNA, 21 bp, synthetic construct
  source 1..21: mol_type = other DNA
cggcctgactcccatgctagg

SEQ ID NO: 1031 - DNA, 21 bp, synthetic construct
  source 1..21: mol_type = other DNA
gcagttgttccaacctagcat

SEQ ID NO: 1032 - DNA, 21 bp, synthetic construct
  source 1..21: mol_type = other DNA
ccgcagttgttccaacctagc

SEQ ID NO: 1033 - DNA, 21 bp, synthetic construct
  source 1..21: mol_type = other DNA
caagaaccactcccagggctg

SEQ ID NO: 1034 - DNA, 21 bp, synthetic construct
  source 1..21: mol_type = other DNA
cttggccctccccgcagccct

SEQ ID NO: 1035 - DNA, 21 bp, synthetic construct
  source 1..21: mol_type = other DNA
cacttggccctccccgcagcc

SEQ ID NO: 1036 - DNA, 21 bp, synthetic construct
  source 1..21: mol_type = other DNA
ggccaagtggcctgtctcttt

SEQ ID NO: 1037 - DNA, 21 bp, synthetic construct
  source 1..21: mol_type = other DNA
ttcatggggaccacatcctca

SEQ ID NO: 1038 - DNA, 21 bp, synthetic construct
  source 1..21: mol_type = other DNA
tgaagtacaccatgtagttca

SEQ ID NO: 1039 - DNA, 21 bp, synthetic construct
  source 1..21: mol_type = other DNA
ctggtgcccctgctgctcatg

SEQ ID NO: 1040 - DNA, 21 bp, synthetic construct
  source 1..21: mol_type = other DNA
gctcatgctgggtgtctattt

SEQ ID NO: 1041 - DNA, 21 bp, synthetic construct
  source 1..21: mol_type = other DNA
cttcagctgtcgtcgcgccgc

SEQ ID NO: 1042 - DNA, 21 bp, synthetic construct
  source 1..21: mol_type = other DNA
cgcgacgacagctgaagcaga

SEQ ID NO: 1043 - DNA, 21 bp, synthetic construct
  source 1..21: mol_type = other DNA
gatggagagccagcctctgcc

SEQ ID NO: 1044 - DNA, 21 bp, synthetic construct
  source 1..21: mol_type = other DNA
gcgtggctgcagtcggggcag

SEQ ID NO: 1045 - DNA, 21 bp, synthetic construct
  source 1..21: mol_type = other DNA
acgatggccaggtacatgagc

SEQ ID NO: 1046 - DNA, 21 bp, synthetic construct
  source 1..21: mol_type = other DNA
ctctcccacaccaattcggtt

SEQ ID NO: 1047 - DNA, 21 bp, synthetic construct
  source 1..21: mol_type = other DNA
gattcacaaccgaattggtgt

SEQ ID NO: 1048 - DNA, 21 bp, synthetic construct
  source 1..21: mol_type = other DNA
gggattcacaaccgaattggt

SEQ ID NO: 1049 - DNA, 21 bp, synthetic construct
  source 1..21: mol_type = other DNA
cgtagatgaagggattcacaa

SEQ ID NO: 1050 - DNA, 21 bp, synthetic construct
  source 1..21: mol_type = other DNA
ggatacggtaggcgtagatga

SEQ ID NO: 1051 - DNA, 21 bp, synthetic construct
  source 1..21: mol_type = other DNA
tcatctacgcctaccgtatcc

SEQ ID NO: 1052 - DNA, 21 bp, synthetic construct
  source 1..21: mol_type = other DNA
cggatacggtaggcgtagatg

SEQ ID NO: 1053 - DNA, 21 bp, synthetic construct
  source 1..21: mol_type = other DNA
gcggaaggtctggcggaactc

SEQ ID NO: 1054 - DNA, 21 bp, synthetic construct
  source 1..21: mol_type = other DNA
aatgatcttgcggaaggtctg

SEQ ID NO: 1055 - DNA, 21 bp, synthetic construct
  source 1..21: mol_type = other DNA
gacgtggctgcgaatgatctt

SEQ ID NO: 1056 - DNA, 21 bp, synthetic construct
  source 1..21: mol_type = other DNA
ttgctgcctcaggacgtggct

SEQ ID NO: 1057 - DNA, 21 bp, synthetic construct
  source 1..21: mol_type = other DNA
caaggcagctggcaccagtgc

SEQ ID NO: 1058 - DNA, 21 bp, synthetic construct
  source 1..21: mol_type = other DNA
cgggcactggtgccagctgcc

SEQ ID NO: 1059 - DNA, 21 bp, synthetic construct
  source 1..21: mol_type = other DNA
cttggcagctcatggcagtga

SEQ ID NO: 1060 - DNA, 21 bp, synthetic construct
  source 1..21: mol_type = other DNA
ccgtctcaacggccacccgcc

SEQ ID NO: 1061 - DNA, 21 bp, synthetic construct
  source 1..21: mol_type = other DNA
cacactcctggcgggtggccg

SEQ ID NO: 1062 - DNA, 21 bp, synthetic construct
  source 1..21: mol_type = other DNA
tgccgttggcccacactcctg

SEQ ID NO: 1063 - DNA, 21 bp, synthetic construct
  source 1..21: mol_type = other DNA
ccattgggcctccgctcaggg

SEQ ID NO: 1064 - DNA, 21 bp, synthetic construct
  source 1..21: mol_type = other DNA
catagccattgggcctccgct

SEQ ID NO: 1065 - DNA, 21 bp, synthetic construct
  source 1..21: mol_type = other DNA
aatggctatgccctggggctg

SEQ ID NO: 1066 - DNA, 21 bp, synthetic construct
  source 1..21: mol_type = other DNA
atgccctggggctggtgagtg

SEQ ID NO: 1067 - DNA, 21 bp, synthetic construct
  source 1..21: mol_type = other DNA
gccctggggctggtgagtgga

SEQ ID NO: 1068 - DNA, 21 bp, synthetic construct
  source 1..21: mol_type = other DNA
tggtgagtggagggagtgccc

SEQ ID NO: 1069 - DNA, 21 bp, synthetic construct
  source 1..21: mol_type = other DNA
gagggagtgcccaagagtccc

SEQ ID NO: 1070 - DNA, 21 bp, synthetic construct
  source 1..21: mol_type = other DNA
agggagtgcccaagagtccca

SEQ ID NO: 1071 - DNA, 21 bp, synthetic construct
  source 1..21: mol_type = other DNA
gtctgggaggcccgtgttccc

SEQ ID NO: 1072 - DNA, 21 bp, synthetic construct
  source 1..21: mol_type = other DNA
catggctaaggagctccacgt

SEQ ID NO: 1073 - DNA, 21 bp, synthetic construct
  source 1..21: mol_type = other DNA
gagctccttagccatgagctc

SEQ ID NO: 1074 - DNA, 21 bp, synthetic construct
  source 1..21: mol_type = other DNA
gctccttagccatgagctcaa

SEQ ID NO: 1075 - DNA, 21 bp, synthetic construct
  source 1..21: mol_type = other DNA
ggcctagatgaccccctggcc

SEQ ID NO: 1076 - DNA, 21 bp, synthetic construct
  source 1..21: mol_type = other DNA
ccccctggcccaggatggagc

SEQ ID NO: 1077 - DNA, 21 bp, synthetic construct
  source 1..21: mol_type = other DNA
ctcctgctccatcctgggcca

SEQ ID NO: 1078 - DNA, 20 bp, synthetic construct
  source 1..20: mol_type = other DNA
ccgtgatgtacaccgaggag

SEQ ID NO: 1079 - DNA, 20 bp, synthetic construct
  source 1..20: mol_type = other DNA
ctttgccatcaccatcagca

SEQ ID NO: 1080 - DNA, 20 bp, synthetic construct
  source 1..20: mol_type = other DNA
tttgccatcaccatcagcac

SEQ ID NO: 1081 - DNA, 20 bp, synthetic construct
  source 1..20: mol_type = other DNA
ttgcctgcttcgtcctggtc

SEQ ID NO: 1082 - DNA, 20 bp, synthetic construct
  source 1..20: mol_type = other DNA
tcctggtcctcacgcagagc

SEQ ID NO: 1083 - DNA, 20 bp, synthetic construct
  source 1..20: mol_type = other DNA
tcttcagtctcctggccatc

SEQ ID NO: 1084 - DNA, 20 bp, synthetic construct
  source 1..20: mol_type = other DNA
gtctcctggccatcgccatt

SEQ ID NO: 1085 - DNA, 20 bp, synthetic construct
  source 1..20: mol_type = other DNA
acctagcatgggagtcaggc

SEQ ID NO: 1086 - DNA, 20 bp, synthetic construct
  source 1..20: mol_type = other DNA
aacctagcatgggagtcagg

SEQ ID NO: 1087 - DNA, 20 bp, synthetic construct
  source 1..20: mol_type = other DNA
atgctaggttggaacaactg

SEQ ID NO: 1088 - DNA, 20 bp, synthetic construct
  source 1..20: mol_type = other DNA
gcagccctgggagtggttct

SEQ ID NO: 1089 - DNA, 20 bp, synthetic construct
  source 1..20: mol_type = other DNA
cgcagccctgggagtggttc

SEQ ID NO: 1090 - DNA, 20 bp, synthetic construct
  source 1..20: mol_type = other DNA
agggctgcggggagggccaa

SEQ ID NO: 1091 - DNA, 20 bp, synthetic construct
  source 1..20: mol_type = other DNA
tggggaccacatcctcaaag

SEQ ID NO: 1092 - DNA, 20 bp, synthetic construct
  source 1..20: mol_type = other DNA
catgaactacatggtgtact

SEQ ID NO: 1093 - DNA, 20 bp, synthetic construct
  source 1..20: mol_type = other DNA
atgaactacatggtgtactt

SEQ ID NO: 1094 - DNA, 20 bp, synthetic construct
  source 1..20: mol_type = other DNA
acttctttgcctgtgtgctg

SEQ ID NO: 1095 - DNA, 20 bp, synthetic construct
  source 1..20: mol_type = other DNA
tgctgctcatgctgggtgtc

SEQ ID NO: 1096 - DNA, 20 bp, synthetic construct
  source 1..20: mol_type = other DNA
caaatagacacccagcatga

SEQ ID NO: 1097 - DNA, 20 bp, synthetic construct
  source 1..20: mol_type = other DNA
gctgtcgtcgcgccgccagg

SEQ ID NO: 1098 - DNA, 20 bp, synthetic construct
  source 1..20: mol_type = other DNA
tggcggcgcgacgacagctg

SEQ ID NO: 1099 - DNA, 20 bp, synthetic construct
  source 1..20: mol_type = other DNA
tctgcttcagctgtcgtcgc

SEQ ID NO: 1100 - DNA, 20 bp, synthetic construct
  source 1..20: mol_type = other DNA
ggcagaggctggctctccat

SEQ ID NO: 1101 - DNA, 20 bp, synthetic construct
  source 1..20: mol_type = other DNA
cggcagaggctggctctcca

SEQ ID NO: 1102 - DNA, 20 bp, synthetic construct
  source 1..20: mol_type = other DNA
ccggcagaggctggctctcc

SEQ ID NO: 1103 - DNA, 20 bp, synthetic construct
  source 1..20: mol_type = other DNA
cactgcagaaggaggtccat

SEQ ID NO: 1104 - DNA, 20 bp, synthetic construct
  source 1..20: mol_type = other DNA
tgctgccaagtcactggcca

SEQ ID NO: 1105 - DNA, 20 bp, synthetic construct
  source 1..20: mol_type = other DNA
acaatgatggccagtgactt

SEQ ID NO: 1106 - DNA, 20 bp, synthetic construct
  source 1..20: mol_type = other DNA
tacacatcatcaactgcttc

SEQ ID NO: 1107 - DNA, 20 bp, synthetic construct
  source 1..20: mol_type = other DNA
ctttcttctgccccgactgc

SEQ ID NO: 1108 - DNA, 20 bp, synthetic construct
  source 1..20: mol_type = other DNA
gactgcagccacgcccctct

SEQ ID NO: 1109 - DNA, 20 bp, synthetic construct
  source 1..20: mol_type = other DNA
tctctggctcatgtacctgg

SEQ ID NO: 1110 - DNA, 20 bp, synthetic construct
  source 1..20: mol_type = other DNA
caaccgaattggtgtgggag

SEQ ID NO: 1111 - DNA, 20 bp, synthetic construct
  source 1..20: mol_type = other DNA
acaccaattcggttgtgaat

SEQ ID NO: 1112 - DNA, 20 bp, synthetic construct
  source 1..20: mol_type = other DNA
gttgtgaatcccttcatcta

SEQ ID NO: 1113 - DNA, 20 bp, synthetic construct
  source 1..20: mol_type = other DNA
ttcatctacgcctaccgtat

SEQ ID NO: 1114 - DNA, 20 bp, synthetic construct
  source 1..20: mol_type = other DNA
tctacgcctaccgtatccgc

SEQ ID NO: 1115 - DNA, 20 bp, synthetic construct
  source 1..20: mol_type = other DNA
cgagttccgccagaccttcc

SEQ ID NO: 1116 - DNA, 20 bp, synthetic construct
  source 1..20: mol_type = other DNA
gccagaccttccgcaagatc

SEQ ID NO: 1117 - DNA, 20 bp, synthetic construct
  source 1..20: mol_type = other DNA
ccagaccttccgcaagatca

SEQ ID NO: 1118 - DNA, 20 bp, synthetic construct
  source 1..20: mol_type = other DNA
gcaagatcattcgcagccac

SEQ ID NO: 1119 - DNA, 20 bp, synthetic construct
  source 1..20: mol_type = other DNA
caagatcattcgcagccacg

SEQ ID NO: 1120 - DNA, 20 bp, synthetic construct
  source 1..20: mol_type = other DNA
cagccacgtcctgaggcagc

SEQ ID NO: 1121 - DNA, 20 bp, synthetic construct
  source 1..20: mol_type = other DNA
aggcagctggcaccagtgcc

SEQ ID NO: 1122 - DNA, 20 bp, synthetic construct
  source 1..20: mol_type = other DNA
tcactgccatgagctgccaa

SEQ ID NO: 1123 - DNA, 20 bp, synthetic construct
  source 1..20: mol_type = other DNA
tctcaacggccacccgccag

SEQ ID NO: 1124 - DNA, 20 bp, synthetic construct
  source 1..20: mol_type = other DNA
ctcagggtggggagcactgc

SEQ ID NO: 1125 - DNA, 20 bp, synthetic construct
  source 1..20: mol_type = other DNA
caccctgagcggaggcccaa

SEQ ID NO: 1126 - DNA, 20 bp, synthetic construct
  source 1..20: mol_type = other DNA
accctgagcggaggcccaat

SEQ ID NO: 1127 - DNA, 20 bp, synthetic construct
  source 1..20: mol_type = other DNA
agggcatagccattgggcct

SEQ ID NO: 1128 - DNA, 20 bp, synthetic construct
  source 1..20: mol_type = other DNA
ctcaccagccccagggcata

SEQ ID NO: 1129 - DNA, 20 bp, synthetic construct
  source 1..20: mol_type = other DNA
tccactcaccagccccaggg

SEQ ID NO: 1130 - DNA, 20 bp, synthetic construct
  source 1..20: mol_type = other DNA
tgggactcttgggcactccc

SEQ ID NO: 1131 - DNA, 20 bp, synthetic construct
  source 1..20: mol_type = other DNA
ctgggactcttgggcactcc

SEQ ID NO: 1132 - DNA, 20 bp, synthetic construct
  source 1..20: mol_type = other DNA
cctgggactcttgggcactc

SEQ ID NO: 1133 - DNA, 20 bp, synthetic construct
  source 1..20: mol_type = other DNA
aggggaacacgggcctccca

SEQ ID NO: 1134 - DNA, 20 bp, synthetic construct
  source 1..20: mol_type = other DNA
cgtctgggaggcccgtgttc

SEQ ID NO: 1135 - DNA, 20 bp, synthetic construct
  source 1..20: mol_type = other DNA
agacgtggagctccttagcc

SEQ ID NO: 1136 - DNA, 20 bp, synthetic construct
  source 1..20: mol_type = other DNA
ttgagctcatggctaaggag

SEQ ID NO: 1137 - DNA, 20 bp, synthetic construct
  source 1..20: mol_type = other DNA
ctggcctagatgaccccctg

SEQ ID NO: 1138 - DNA, 20 bp, synthetic construct
  source 1..20: mol_type = other DNA
tggcctagatgaccccctgg

SEQ ID NO: 1139 - DNA, 20 bp, synthetic construct
  source 1..20: mol_type = other DNA
tcctgggccagggggtcatc

SEQ ID NO: 1140 - DNA, 20 bp, synthetic construct
  source 1..20: mol_type = other DNA
ctggcccaggatggagcagg

SEQ ID NO: 1141 - DNA, 20 bp, synthetic construct
  source 1..20: mol_type = other DNA
tggcccaggatggagcagga

SEQ ID NO: 1142 - DNA, 20 bp, synthetic construct
  source 1..20: mol_type = other DNA
cgcgagttccgccagacctt

SEQ ID NO: 1143 - DNA, 20 bp, synthetic construct
  source 1..20: mol_type = other DNA
ccctggggctggtgagtgga

SEQ ID NO: 1144-1171 - skipped (28 entries)

SEQ ID NO: 1172 - DNA, 21 bp, synthetic construct
  source 1..21: mol_type = other DNA
tgatgtgagattttccacctg

SEQ ID NO: 1173 - DNA, 21 bp, synthetic construct
  source 1..21: mol_type = other DNA
actgacagcgtgaacaggtag

SEQ ID NO: 1174 - DNA, 21 bp, synthetic construct
  source 1..21: mol_type = other DNA
ccatcggcctgactcccatgc

SEQ ID NO: 1175 - DNA, 21 bp, synthetic construct
  source 1..21: mol_type = other DNA
tgcagagaaaggtggctctat

SEQ ID NO: 1176 - DNA, 21 bp, synthetic construct
  source 1..21: mol_type = other DNA
gcaactgaacaggaaataacc

SEQ ID NO: 1177-2249 - skipped (1073 entries)

SEQ ID NO: 2250 - DNA, 21 bp, synthetic construct
  source 1..21: mol_type = other DNA
aggctttggctggttctttag

SEQ ID NO: 2251-2259 - skipped (9 entries)

SEQ ID NO: 2260 - DNA, 21 bp, synthetic construct
  source 1..21: mol_type = other DNA
gctggttctttagtcagcttc

SEQ ID NO: 2261-2269 - skipped (9 entries)

SEQ ID NO: 2270 - DNA, 21 bp, synthetic construct
  source 1..21: mol_type = other DNA
gtcagcttcttcctctgattc

SEQ ID NO: 2271-2279 - skipped (9 entries)

SEQ ID NO: 2280 - DNA, 21 bp, synthetic construct
  source 1..21: mol_type = other DNA
taaccaggttagccactgatt

SEQ ID NO: 2281-2289 - skipped (9 entries)

SEQ ID NO: 2290 - DNA, 21 bp, synthetic construct
  source 1..21: mol_type = other DNA
acaaaagacttacctggaaca

SEQ ID NO: 2291-2299 - skipped (9 entries)

SEQ ID NO: 2300 - DNA, 21 bp, synthetic construct
  source 1..21: mol_type = other DNA
ccggaaactcttgggttatat

SEQ ID NO: 2301-2309 - skipped (9 entries)

SEQ ID NO: 2310 - DNA, 21 bp, synthetic construct
  source 1..21: mol_type = other DNA
caagccaagaaagcttcttct

SEQ ID NO: 2311-2319 - skipped (9 entries)

SEQ ID NO: 2320 - DNA, 21 bp, synthetic construct
  source 1..21: mol_type = other DNA
catgtcatagaagtgcacaaa

SEQ ID NO: 2321-2329 - skipped (9 entries)

SEQ ID NO: 2330 - DNA, 21 bp, synthetic construct
  source 1..21: mol_type = other DNA
ggaagttgctgttatagcagt

SEQ ID NO: 2331-2339 - skipped (9 entries)

SEQ ID NO: 2340 - DNA, 21 bp, synthetic construct
  source 1..21: mol_type = other DNA
tgcattactggcttgaaagat

SEQ ID NO: 2341-2349 - skipped (9 entries)

SEQ ID NO: 2350 - DNA, 21 bp, synthetic construct
  source 1..21: mol_type = other DNA
ctgctctaactgttctttgga

SEQ ID NO: 2351-2359 - skipped (9 entries)

SEQ ID NO: 2360 - DNA, 21 bp, synthetic construct
  source 1..21: mol_type = other DNA
gaaggagcagaggatgaatct

SEQ ID NO: 2361-2369 - skipped (9 entries)

SEQ ID NO: 2370 - DNA, 21 bp, synthetic construct
  source 1..21: mol_type = other DNA
atcgctgggggggtttacttc

SEQ ID NO: 2371-2379 - skipped (9 entries)

SEQ ID NO: 2380 - DNA, 21 bp, synthetic construct
  source 1..21: mol_type = other DNA
cttcactagaaatgtactgta

SEQ ID NO: 2381-2389 - skipped (9 entries)

SEQ ID NO: 2390 - DNA, 21 bp, synthetic construct
  source 1..21: mol_type = other DNA
tctacatgaagtttgggagag

SEQ ID NO: 2391-2399 - skipped (9 entries)

SEQ ID NO: 2400 - DNA, 21 bp, synthetic construct
  source 1..21: mol_type = other DNA
ggagagatgttatctttaatc

SEQ ID NO: 2401-2409 - skipped (9 entries)

SEQ ID NO: 2410 - DNA, 21 bp, synthetic construct
  source 1..21: mol_type = other DNA
tatatggtttgaggggatgga

SEQ ID NO: 2411-2419 - skipped (9 entries)

SEQ ID NO: 2420 - DNA, 21 bp, synthetic construct
  source 1..21: mol_type = other DNA
aggggatggatccaactttat

SEQ ID NO: 2421-2429 - skipped (9 entries)

SEQ ID NO: 2430 - DNA, 21 bp, synthetic construct
  source 1..21: mol_type = other DNA
taggtgaatcagtggctaacc

SEQ ID NO: 2431-2439 - skipped (9 entries)

SEQ ID NO: 2440 - DNA, 21 bp, synthetic construct
  source 1..21: mol_type = other DNA
caaatcttaatttataggtga

SEQ ID NO: 2441-2449 - skipped (9 entries)

SEQ ID NO: 2450 - DNA, 21 bp, synthetic construct
  source 1..21: mol_type = other DNA
atttacaaatcttaatttata

SEQ ID NO: 2451-2459 - skipped (9 entries)

SEQ ID NO: 2460 - DNA, 21 bp, synthetic construct
  source 1..21: mol_type = other DNA
cgggaaaaggcaaggctttgt

SEQ ID NO: 2461-2469 - skipped (9 entries)

SEQ ID NO: 2470 - DNA, 21 bp, synthetic construct
  source 1..21: mol_type = other DNA
ttggcttggaaagaagatata

SEQ ID NO: 2471-2479 - skipped (9 entries)

SEQ ID NO: 2480 - DNA, 21 bp, synthetic construct
  source 1..21: mol_type = other DNA
tgcacttctatgacatggaaa

SEQ ID NO: 2481-2489 - skipped (9 entries)

SEQ ID NO: 2490 - DNA, 21 bp, synthetic construct
  source 1..21: mol_type = other DNA
aggcatgttacttcgcttttt

SEQ ID NO: 2491-2499 - skipped (9 entries)

SEQ ID NO: 2500 - DNA, 21 bp, synthetic construct
  source 1..21: mol_type = other DNA
ttcatgatcacgttgatctac

SEQ ID NO: 2501-2509 - skipped (9 entries)

SEQ ID NO: 2510 - DNA, 21 bp, synthetic construct
  source 1..21: mol_type = other DNA
aagccagtaatgcagaaattt

SEQ ID NO: 2511-2519 - skipped (9 entries)

SEQ ID NO: 2520 - DNA, 21 bp, synthetic construct
  source 1..21: mol_type = other DNA
tagtgaagtaaacccccccag

SEQ ID NO: 2521-2529 - skipped (9 entries)

SEQ ID NO: 2530 - DNA, 21 bp, synthetic construct
  source 1..21: mol_type = other DNA
tgtccagcttcttacagtaca

SEQ ID NO: 2531-2539 - skipped (9 entries)

SEQ ID NO: 2540 - DNA, 21 bp, synthetic construct
  source 1..21: mol_type = other DNA
tgaacatcttaatgactaggt

SEQ ID NO: 2541-2549 - skipped (9 entries)

SEQ ID NO: 2550 - DNA, 21 bp, synthetic construct
  source 1..21: mol_type = other DNA
aagaccttaccttttttaata

SEQ ID NO: 2551-2559 - skipped (9 entries)

SEQ ID NO: 2560 - DNA, 21 bp, synthetic construct
  source 1..21: mol_type = other DNA
caatgaacttaccttccaaca

SEQ ID NO: 2561-2569 - skipped (9 entries)

SEQ ID NO: 2570 - DNA, 21 bp, synthetic construct
  source 1..21: mol_type = other DNA
agcagggcagaataaaaacca

SEQ ID NO: 2571-2579 - skipped (9 entries)

SEQ ID NO: 2580 - DNA, 21 bp, synthetic construct
  source 1..21: mol_type = other DNA
ttcataatttcagcagggcag

SEQ ID NO: 2581-2589 - skipped (9 entries)

SEQ ID NO: 2590 - DNA, 21 bp, synthetic construct
  source 1..21: mol_type = other DNA
ctttgttcataatttcagcag

SEQ ID NO: 2591-2599 - skipped (9 entries)

SEQ ID NO: 2600 - DNA, 21 bp, synthetic construct
  source 1..21: mol_type = other DNA
caggctgcaaactacttagac

SEQ ID NO: 2601-2609 - skipped (9 entries)

SEQ ID NO: 2610 - DNA, 21 bp, synthetic construct
  source 1..21: mol_type = other DNA
ttgttgtaggtcattcagtgg

SEQ ID NO: 2611-2619 - skipped (9 entries)

SEQ ID NO: 2620 - DNA, 21 bp, synthetic construct
  source 1..21: mol_type = other DNA
ttagatttgggaatggatgat

SEQ ID NO: 2621-2629 - skipped (9 entries)

SEQ ID NO: 2630 - DNA, 21 bp, synthetic construct
  source 1..21: mol_type = other DNA
ttctggttttcttagatttgg

SEQ ID NO: 2631-2639 - skipped (9 entries)

SEQ ID NO: 2640 - DNA, 21 bp, synthetic construct
  source 1..21: mol_type = other DNA
gatgccttcaattaagttgca

SEQ ID NO: 2641-2649 - skipped (9 entries)

SEQ ID NO: 2650 - DNA, 21 bp, synthetic construct
  source 1..21: mol_type = other DNA
atgtcctttttttttagatgc

SEQ ID NO: 2651-2659 - skipped (9 entries)

SEQ ID NO: 2660 - DNA, 21 bp, synthetic construct
  source 1..21: mol_type = other DNA
aagctttatgctgaaaaggtg

SEQ ID NO: 2661-2669 - skipped (9 entries)

SEQ ID NO: 2670 - DNA, 21 bp, synthetic construct
  source 1..21: mol_type = other DNA
aagggcctgctatggtgtgct

SEQ ID NO: 2671-2679 - skipped (9 entries)

SEQ ID NO: 2680 - DNA, 21 bp, synthetic construct
  source 1..21: mol_type = other DNA
aaggaagcaagggatatcctg

SEQ ID NO: 2681-2689 - skipped (9 entries)

SEQ ID NO: 2690 - DNA, 21 bp, synthetic construct
  source 1..21: mol_type = other DNA
agcataaagctttaaaggaag

SEQ ID NO: 2691-2699 - skipped (9 entries)

SEQ ID NO: 2700 - DNA, 21 bp, synthetic construct
  source 1..21: mol_type = other DNA
ccagacaccacaacctcgcag

SEQ ID NO: 2701-2709 - skipped (9 entries)

SEQ ID NO: 2710 - DNA, 21 bp, synthetic construct
  source 1..21: mol_type = other DNA
ccaagcactctcagctgctca

SEQ ID NO: 2711-2719 - skipped (9 entries)

SEQ ID NO: 2720 - DNA, 21 bp, synthetic construct
  source 1..21: mol_type = other DNA
ttcttccatcttttcccacag

SEQ ID NO: 2721-2729 - skipped (9 entries)

SEQ ID NO: 2730 - DNA, 21 bp, synthetic construct
  source 1..21: mol_type = other DNA
ccacaggtggcagctgccaac

SEQ ID NO: 2731-2739 - skipped (9 entries)

SEQ ID NO: 2740 - DNA, 21 bp, synthetic construct
  source 1..21: mol_type = other DNA
tctgacgtcccccatagatct

SEQ ID NO: 2741-2749 - skipped (9 entries)

SEQ ID NO: 2750 - DNA, 21 bp, synthetic construct
  source 1..21: mol_type = other DNA
agccctcttaccttccacctc

SEQ ID NO: 2751-2759 - skipped (9 entries)

SEQ ID NO: 2760 - DNA, 21 bp, synthetic construct
  source 1..21: mol_type = other DNA
tgttcatttattgaagttcta

SEQ ID NO: 2761-2769 - skipped (9 entries)

SEQ ID NO: 2770 - DNA, 21 bp, synthetic construct
  source 1..21: mol_type = other DNA
gttcggccttcttcctcttct

SEQ ID NO: 2771-2779 - skipped (9 entries)

SEQ ID NO: 2780 - DNA, 21 bp, synthetic construct
  source 1..21: mol_type = other DNA
tagaccatgtctgctaaagag

SEQ ID NO: 2781-2789 - skipped (9 entries)

SEQ ID NO: 2790 - DNA, 21 bp, synthetic construct
  source 1..21: mol_type = other DNA
gaaaaataactaaacatgggc

SEQ ID NO: 2791-2799 - skipped (9 entries)

SEQ ID NO: 2800 - DNA, 21 bp, synthetic construct
  source 1..21: mol_type = other DNA
ccccaaatagaacctaccaag

SEQ ID NO: 2801-2809 - skipped (9 entries)

SEQ ID NO: 2810 - DNA, 21 bp, synthetic construct
  source 1..21: mol_type = other DNA
acttcaggtaccccaatctga

SEQ ID NO: 2811-2819 - skipped (9 entries)

SEQ ID NO: 2820 - DNA, 21 bp, synthetic construct
  source 1..21: mol_type = other DNA
ctttttcacttcaggtacccc

SEQ ID NO: 2821-2829 - skipped (9 entries)

SEQ ID NO: 2830 - DNA, 21 bp, synthetic construct
  source 1..21: mol_type = other DNA
tgtttgctttttcacttcagg

SEQ ID NO: 2831-2839 - skipped (9 entries)

SEQ ID NO: 2840 - DNA, 21 bp, synthetic construct
  source 1..21: mol_type = other DNA
accacagtatcaatggagtga

SEQ ID NO: 2841-2849 - skipped (9 entries)

SEQ ID NO: 2850 - DNA, 21 bp, synthetic construct
  source 1..21: mol_type = other DNA
tggtccgttttcaccacagta

SEQ ID NO: 2851-2859 - skipped (9 entries)

SEQ ID NO: 2860 - DNA, 21 bp, synthetic construct
  source 1..21: mol_type = other DNA
aggtcaaggccttcttggctg

SEQ ID NO: 2861-2869 - skipped (9 entries)

SEQ ID NO: 2870 - DNA, 21 bp, synthetic construct
  source 1..21: mol_type = other DNA
accacttcccccctcctttca

SEQ ID NO: 2871-2879 - skipped (9 entries)

SEQ ID NO: 2880 - DNA, 21 bp, synthetic construct
  source 1..21: mol_type = other DNA
ctcacctgccataaatatagg

SEQ ID NO: 2881-2889 - skipped (9 entries)

SEQ ID NO: 2890 - DNA, 21 bp, synthetic construct
  source 1..21: mol_type = other DNA
cagtatgagggcacctacaag

SEQ ID NO: 2891-2899 - skipped (9 entries)

SEQ ID NO: 2900 - DNA, 21 bp, synthetic construct
  source 1..21: mol_type = other DNA
accccactgctgcaccagatt

SEQ ID NO: 2901-2909 - skipped (9 entries)

SEQ ID NO: 2910 - DNA, 21 bp, synthetic construct
  source 1..21: mol_type = other DNA
cgccacgtaggggtgcccttc

SEQ ID NO: 2911-2919 - skipped (9 entries)

SEQ ID NO: 2920 - DNA, 21 bp, synthetic construct
  source 1..21: mol_type = other DNA
gcttgtagtgccgctgctgca

SEQ ID NO: 2921-2929 - skipped (9 entries)

SEQ ID NO: 2930 - DNA, 21 bp, synthetic construct
  source 1..21: mol_type = other DNA
ccgtggtgctcgaagggctct

SEQ ID NO: 2931-2939 - skipped (9 entries)

SEQ ID NO: 2940 - DNA, 21 bp, synthetic construct
  source 1..21: mol_type = other DNA
ttgcagcacaagctccgggtg

SEQ ID NO: 2941-2949 - skipped (9 entries)

SEQ ID NO: 2950 - DNA, 21 bp, synthetic construct
  source 1..21: mol_type = other DNA
tgcctaatttgttgcagcaca

SEQ ID NO: 2951-2959 - skipped (9 entries)

SEQ ID NO: 2960 - DNA, 21 bp, synthetic construct
  source 1..21: mol_type = other DNA
tagcaagaagatccatcgcag

SEQ ID NO: 2961-2969 - skipped (9 entries)

SEQ ID NO: 2970 - DNA, 21 bp, synthetic construct
  source 1..21: mol_type = other DNA
agtcttcccatgcacaagatg

SEQ ID NO: 2971-2979 - skipped (9 entries)

SEQ ID NO: 2980 - DNA, 21 bp, synthetic construct
  source 1..21: mol_type = other DNA
cctttcagtcttcccatgcac

SEQ ID NO: 2981-2989 - skipped (9 entries)

SEQ ID NO: 2990 - DNA, 21 bp, synthetic construct
  source 1..21: mol_type = other DNA
tccccagctgagtccagattg

SEQ ID NO: 2991-2999 - skipped (9 entries)

SEQ ID NO: 3000 - DNA, 21 bp, synthetic construct
  source 1..21: mol_type = other DNA
ttcctcttagtacctttgtgt

SEQ ID NO: 3001-3009 - skipped (9 entries)

SEQ ID NO: 3010 - DNA, 21 bp, synthetic construct
  source 1..21: mol_type = other DNA
gatggctcccgcaaagaaggg

SEQ ID NO: 3011-3019 - skipped (9 entries)

SEQ ID NO: 3020 - DNA, 21 bp, synthetic construct
  source 1..21: mol_type = other DNA
aatcgtaggggcttcaagaag

SEQ ID NO: 3021-3029 - skipped (9 entries)

SEQ ID NO: 3030 - DNA, 21 bp, synthetic construct
  source 1..21: mol_type = other DNA
ttaggaatgtgccataccgaa

SEQ ID NO: 3031-3039 - skipped (9 entries)

SEQ ID NO: 3040 - DNA, 21 bp, synthetic construct
  source 1..21: mol_type = other DNA
cagatctacagacagtcaatg

SEQ ID NO: 3041-3049 - skipped (9 entries)

SEQ ID NO: 3050 - DNA, 21 bp, synthetic construct
  source 1..21: mol_type = other DNA
gcaccttattcctttggccca

SEQ ID NO: 3051-3059 - skipped (9 entries)

SEQ ID NO: 3060 - DNA, 21 bp, synthetic construct
  source 1..21: mol_type = other DNA
tgggatggagaacttactttt

SEQ ID NO: 3061-3069 - skipped (9 entries)

SEQ ID NO: 3070 - DNA, 21 bp, synthetic construct
  source 1..21: mol_type = other DNA
atctgacgatcagcgattagt

SEQ ID NO: 3071-3079 - skipped (9 entries)

SEQ ID NO: 3080 - DNA, 21 bp, synthetic construct
  source 1..21: mol_type = other DNA
actgtctttttcatattttag

SEQ ID NO: 3081-3089 - skipped (9 entries)

SEQ ID NO: 3090 - DNA, 21 bp, synthetic construct
  source 1..21: mol_type = other DNA
atattttaggacccagatgat

SEQ ID NO: 3091-3099 - skipped (9 entries)

SEQ ID NO: 3100 - DNA, 21 bp, synthetic construct
  source 1..21: mol_type = other DNA
ggacccagatgatgtggtacc

SEQ ID NO: 3101-3109 - skipped (9 entries)

SEQ ID NO: 3110 - DNA, 21 bp, synthetic construct
  source 1..21: mol_type = other DNA
gactagcatttatgcttgcag

SEQ ID NO: 3111-3119 - skipped (9 entries)

SEQ ID NO: 3120 - DNA, 21 bp, synthetic construct
  source 1..21: mol_type = other DNA
tgcttgcaggtgttattctag

SEQ ID NO: 3121-3129 - skipped (9 entries)

SEQ ID NO: 3130 - DNA, 21 bp, synthetic construct
  source 1..21: mol_type = other DNA
tgaatgtaggctggaacctat

SEQ ID NO: 3131-3139 - skipped (9 entries)

SEQ ID NO: 3140 - DNA, 21 bp, synthetic construct
  source 1..21: mol_type = other DNA
cctcagtcctatctgattcat

SEQ ID NO: 3141-3149 - skipped (9 entries)

SEQ ID NO: 3150 - DNA, 21 bp, synthetic construct
  source 1..21: mol_type = other DNA
tttatttatcgactgtgtcat

SEQ ID NO: 3151-3159 - skipped (9 entries)

SEQ ID NO: 3160 - DNA, 21 bp, synthetic construct
  source 1..21: mol_type = other DNA
tttatcgactgtgtcatgaca

SEQ ID NO: 3161-3169 - skipped (9 entries)

SEQ ID NO: 3170 - DNA, 21 bp, synthetic construct
  source 1..21: mol_type = other DNA
tcgactgtgtcatgacaagga

SEQ ID NO: 3171-3179 - skipped (9 entries)

SEQ ID NO: 3180 - DNA, 21 bp, synthetic construct
  source 1..21: mol_type = other DNA
cctctccaacaggtattcaga

SEQ ID NO: 3181-3189 - skipped (9 entries)

SEQ ID NO: 3190 - DNA, 21 bp, synthetic construct
  source 1..21: mol_type = other DNA
gcaattcggcattttgaaaac

SEQ ID NO: 3191-3199 - skipped (9 entries)

SEQ ID NO: 3200 - DNA, 21 bp, synthetic construct
  source 1..21: mol_type = other DNA
aaaacaaatttgccgtggaaa

SEQ ID NO: 3201-3209 - skipped (9 entries)

SEQ ID NO: 3210 - DNA, 21 bp, synthetic construct
  source 1..21: mol_type = other DNA
ccgtggaaactttaatttgtt

SEQ ID NO: 3211-3219 - skipped (9 entries)

SEQ ID NO: 3220 - DNA, 21 bp, synthetic construct
  source 1..21: mol_type = other DNA
gccaactggtaccacatcatc

SEQ ID NO: 3221-3229 - skipped (9 entries)

SEQ ID NO: 3230 - DNA, 21 bp, synthetic construct
  source 1..21: mol_type = other DNA
tacaagtatgctcctcctaga

SEQ ID NO: 3231-3239 - skipped (9 entries)

SEQ ID NO: 3240 - DNA, 21 bp, synthetic construct
  source 1..21: mol_type = other DNA
cacttacttgaagtgcaaaat

SEQ ID NO: 3241-3249 - skipped (9 entries)

SEQ ID NO: 3250 - DNA, 21 bp, synthetic construct
  source 1..21: mol_type = other DNA
aatgcgatcagtaataaccat

SEQ ID NO: 3251-3259 - skipped (9 entries)

SEQ ID NO: 3260 - DNA, 21 bp, synthetic construct
  source 1..21: mol_type = other DNA
cttgtcatgacacagtcgata

SEQ ID NO: 3261-3269 - skipped (9 entries)

SEQ ID NO: 3270 - DNA, 21 bp, synthetic construct
  source 1..21: mol_type = other DNA
taagtttccttgtcatgacac

SEQ ID NO: 3271-3279 - skipped (9 entries)

SEQ ID NO: 3280 - DNA, 21 bp, synthetic construct
  source 1..21: mol_type = other DNA
tctgcgttgcagtttgtaagt

SEQ ID NO: 3281-3289 - skipped (9 entries)

SEQ ID NO: 3290 - DNA, 21 bp, synthetic construct
  source 1..21: mol_type = other DNA
atagtttctctgcgttgcagt

SEQ ID NO: 3291-3299 - skipped (9 entries)

SEQ ID NO: 3300 - DNA, 21 bp, synthetic construct
  source 1..21: mol_type = other DNA
aaaagtattacctttaatagt

SEQ ID NO: 3301-3309 - skipped (9 entries)

SEQ ID NO: 3310 - DNA, 21 bp, synthetic construct
  source 1..21: mol_type = other DNA
atatttaaaaagtattacctt

SEQ ID NO: 3311-3319 - skipped (9 entries)

SEQ ID NO: 3320 - DNA, 21 bp, synthetic construct
  source 1..21: mol_type = other DNA
aaaatgccgaattgcgaaaca

SEQ ID NO: 3321-3329 - skipped (9 entries)

SEQ ID NO: 3330 - DNA, 21 bp, synthetic construct
  source 1..21: mol_type = other DNA
ttttcaaaatgccgaattgcg

SEQ ID NO: 3331-3339 - skipped (9 entries)

SEQ ID NO: 3340 - DNA, 21 bp, synthetic construct
  source 1..21: mol_type = other DNA
cacggcaaatttgttttcaaa

SEQ ID NO: 3341-3349 - skipped (9 entries)

SEQ ID NO: 3350 - DNA, 21 bp, synthetic construct
  source 1..21: mol_type = other DNA
ttgactgttcaagaacaaatt

SEQ ID NO: 3351-3359 - skipped (9 entries)

SEQ ID NO: 3360 - DNA, 21 bp, synthetic construct
  source 1..21: mol_type = other DNA
cttttctcccagctcctgccc

SEQ ID NO: 3361-3369 - skipped (9 entries)

SEQ ID NO: 3370 - DNA, 21 bp, synthetic construct
  source 1..21: mol_type = other DNA
tcccagctcctgcccctccta

SEQ ID NO: 3371-3379 - skipped (9 entries)

SEQ ID NO: 3380 - DNA, 21 bp, synthetic construct
  source 1..21: mol_type = other DNA
cctctcccaggcttgaccact

SEQ ID NO: 3381-3389 - skipped (9 entries)

SEQ ID NO: 3390 - DNA, 21 bp, synthetic construct
  source 1..21: mol_type = other DNA
tttttcagattgggatcatct

SEQ ID NO: 3391-3399 - skipped (9 entries)

SEQ ID NO: 3400 - DNA, 21 bp, synthetic construct
  source 1..21: mol_type = other DNA
taggaaggaaacttactttgt

SEQ ID NO: 3401-3409 - skipped (9 entries)

SEQ ID NO: 3410 - DNA, 21 bp, synthetic construct
  source 1..21: mol_type = other DNA
gtctgggctgccaacatggta

SEQ ID NO: 3411-3419 - skipped (9 entries)

SEQ ID NO: 3420 - DNA, 21 bp, synthetic construct
  source 1..21: mol_type = other DNA
tattcctgcaggcaagcaccg

SEQ ID NO: 3421-3429 - skipped (9 entries)

SEQ ID NO: 3430 - DNA, 21 bp, synthetic construct
  source 1..21: mol_type = other DNA
tctgttcttctagggctacta

SEQ ID NO: 3431-3439 - skipped (9 entries)

SEQ ID NO: 3440 - DNA, 21 bp, synthetic construct
  source 1..21: mol_type = other DNA
ccctctgactctctcccagtc

SEQ ID NO: 3441-3449 - skipped (9 entries)

SEQ ID NO: 3450 - DNA, 21 bp, synthetic construct
  source 1..21: mol_type = other DNA
ctccttttgtaggcctatacc

SEQ ID NO: 3451-3459 - skipped (9 entries)

SEQ ID NO: 3460 - DNA, 21 bp, synthetic construct
  source 1..21: mol_type = other DNA
taggcctataccattcaagga

SEQ ID NO: 3461-3469 - skipped (9 entries)

SEQ ID NO: 3470 - DNA, 21 bp, synthetic construct
  source 1..21: mol_type = other DNA
ctccttgcagttgaccaagct

SEQ ID NO: 3471-3479 - skipped (9 entries)

SEQ ID NO: 3480 - DNA, 21 bp, synthetic construct
  source 1..21: mol_type = other DNA
acttgtatcttaacaggcatt

SEQ ID NO: 3481-3489 - skipped (9 entries)

SEQ ID NO: 3490 - DNA, 21 bp, synthetic construct
  source 1..21: mol_type = other DNA
gcaggtttggatgcatctgct

SEQ ID NO: 3491-3499 - skipped (9 entries)

SEQ ID NO: 3500 - DNA, 21 bp, synthetic construct
  source 1..21: mol_type = other DNA
tttctcccttaagttgattgg

SEQ ID NO: 3501-3509 - skipped (9 entries)

SEQ ID NO: 3510 - DNA, 21 bp, synthetic construct
  source 1..21: mol_type = other DNA
tcccttaagttgattggctgc

SEQ ID NO: 3511-3519 - skipped (9 entries)

SEQ ID NO: 3520 - DNA, 21 bp, synthetic construct
  source 1..21: mol_type = other DNA
tgtgttacaggctttcctcgg

SEQ ID NO: 3521-3529 - skipped (9 entries)

SEQ ID NO: 3530 - DNA, 21 bp, synthetic construct
  source 1..21: mol_type = other DNA
agcatgagcctgagggcttac

SEQ ID NO: 3531-3539 - skipped (9 entries)

SEQ ID NO: 3540 - DNA, 21 bp, synthetic construct
  source 1..21: mol_type = other DNA
ttacctgaccacctgcaaaga

SEQ ID NO: 3541-3549 - skipped (9 entries)

SEQ ID NO: 3550 - DNA, 21 bp, synthetic construct
  source 1..21: mol_type = other DNA
atcattaccccaatagccttt

SEQ ID NO: 3551-3559 - skipped (9 entries)

SEQ ID NO: 3560 - DNA, 21 bp, synthetic construct
  source 1..21: mol_type = other DNA
tcttcctcagactgctgagaa

SEQ ID NO: 3561-3569 - skipped (9 entries)

SEQ ID NO: 3570 - DNA, 21 bp, synthetic construct
  source 1..21: mol_type = other DNA
ctaggccgtttgagcaaggaa

SEQ ID NO: 3571-3579 - skipped (9 entries)

SEQ ID NO: 3580 - DNA, 21 bp, synthetic construct
  source 1..21: mol_type = other DNA
tttcctaggccgtttgagcaa

SEQ ID NO: 3581-3589 - skipped (9 entries)

SEQ ID NO: 3590 - DNA, 21 bp, synthetic construct
  source 1..21: mol_type = other DNA
atcagcactgaaaccaacctg

SEQ ID NO: 3591-3599 - skipped (9 entries)

SEQ ID NO: 3600 - DNA, 21 bp, synthetic construct
  source 1..21: mol_type = other DNA
agttggctggatctattattg

SEQ ID NO: 3601-3609 - skipped (9 entries)

SEQ ID NO: 3610 - DNA, 21 bp, synthetic construct
  source 1..21: mol_type = other DNA
aaaaatcttttcagttggctg

SEQ ID NO: 3611-3619 - skipped (9 entries)

SEQ ID NO: 3620 - DNA, 21 bp, synthetic construct
  source 1..21: mol_type = other DNA
aatcagattattcctatgcag

SEQ ID NO: 3621-3629 - skipped (9 entries)

SEQ ID NO: 3630 - DNA, 21 bp, synthetic construct
  source 1..21: mol_type = other DNA
tgtttttagggtggctccgga

SEQ ID NO: 3631-3639 - skipped (9 entries)

SEQ ID NO: 3640 - DNA, 21 bp, synthetic construct
  source 1..21: mol_type = other DNA
tttctgtttttagggtggctc

SEQ ID NO: 3641-3649 - skipped (9 entries)

SEQ ID NO: 3650 - DNA, 21 bp, synthetic construct
  source 1..21: mol_type = other DNA
tctctaacaggttggtttcag

SEQ ID NO: 3651-3659 - skipped (9 entries)

SEQ ID NO: 3660 - DNA, 21 bp, synthetic construct
  source 1..21: mol_type = other DNA
tctcttactatagattgctta

SEQ ID NO: 3661-3669 - skipped (9 entries)

SEQ ID NO: 3670 - DNA, 21 bp, synthetic construct
  source 1..21: mol_type = other DNA
cattggtttcttgaatagctt

SEQ ID NO: 3671-3679 - skipped (9 entries)

SEQ ID NO: 3680 - DNA, 21 bp, synthetic construct
  source 1..21: mol_type = other DNA
ttgaatagcttctcaataggt

SEQ ID NO: 3681-3689 - skipped (9 entries)

SEQ ID NO: 3690 - DNA, 21 bp, synthetic construct
  source 1..21: mol_type = other DNA
tgtagctccagctaggatgat

SEQ ID NO: 3691-3699 - skipped (9 entries)

SEQ ID NO: 3700 - DNA, 21 bp, synthetic construct
  source 1..21: mol_type = other DNA
ccttaactgctctgcgcccag

SEQ ID NO: 3701-3709 - skipped (9 entries)

SEQ ID NO: 3710 - DNA, 21 bp, synthetic construct
  source 1..21: mol_type = other DNA
ttaggtacacgatttttaagg

SEQ ID NO: 3711-3719 - skipped (9 entries)

SEQ ID NO: 3720 - DNA, 21 bp, synthetic construct
  source 1..21: mol_type = other DNA
cttcagatgaaatccacgatg

SEQ ID NO: 3721-3729 - skipped (9 entries)

SEQ ID NO: 3730 - DNA, 21 bp, synthetic construct
  source 1..21: mol_type = other DNA
gacaaggtcattgtgccctgc

SEQ ID NO: 3731-3739 - skipped (9 entries)

SEQ ID NO: 3740 - DNA, 21 bp, synthetic construct
  source 1..21: mol_type = other DNA
agatgtggctggtcatggaag

SEQ ID NO: 3741-3749 - skipped (9 entries)

SEQ ID NO: 3750 - DNA, 21 bp, synthetic construct
  source 1..21: mol_type = other DNA
ttgtactcgccgacggcaaag

SEQ ID NO: 3751-3759 - skipped (9 entries)

SEQ ID NO: 3760 - DNA, 21 bp, synthetic construct
  source 1..21: mol_type = other DNA
cagatctacgctgtgccttgg

SEQ ID NO: 3761-3769 - skipped (9 entries)

SEQ ID NO: 3770 - DNA, 21 bp, synthetic construct
  source 1..21: mol_type = other DNA
acagaaagcattctgctcttt

SEQ ID NO: 3771-3779 - skipped (9 entries)

SEQ ID NO: 3780 - DNA, 21 bp, synthetic construct
  source 1..21: mol_type = other DNA
ctttcacagaaagcattctgc

SEQ ID NO: 3781-3789 - skipped (9 entries)

SEQ ID NO: 3790 - DNA, 21 bp, synthetic construct
  source 1..21: mol_type = other DNA
acatgtgtagatcgtagctgg

SEQ ID NO: 3791-3799 - skipped (9 entries)

SEQ ID NO: 3800 - DNA, 21 bp, synthetic construct
  source 1..21: mol_type = other DNA
ccgtcggcgagtacaacaaag

SEQ ID NO: 3801-3809 - skipped (9 entries)

SEQ ID NO: 3810 - DNA, 21 bp, synthetic construct
  source 1..21: mol_type = other DNA
tcaccaagagcgagaaccctg

SEQ ID NO: 3811-3819 - skipped (9 entries)

SEQ ID NO: 3820 - DNA, 21 bp, synthetic construct
  source 1..21: mol_type = other DNA
ttacagtcgtgtctgttcaaa

SEQ ID NO: 3821-3829 - skipped (9 entries)

SEQ ID NO: 3830 - DNA, 21 bp, synthetic construct
  source 1..21: mol_type = other DNA
tactgtacatgcttccttttt

SEQ ID NO: 3831-3839 - skipped (9 entries)

SEQ ID NO: 3840 - DNA, 21 bp, synthetic construct
  source 1..21: mol_type = other DNA
caaatgacattatctgagagc

SEQ ID NO: 3841-3849 - skipped (9 entries)

SEQ ID NO: 3850 - DNA, 21 bp, synthetic construct
  source 1..21: mol_type = other DNA
ctcacgtggcacagcactccg

SEQ ID NO: 3851-3859 - skipped (9 entries)

SEQ ID NO: 3860 - DNA, 21 bp, synthetic construct
  source 1..21: mol_type = other DNA
tgtgggaaccatacctttagg

SEQ ID NO: 3861-3869 - skipped (9 entries)

SEQ ID NO: 3870 - DNA, 21 bp, synthetic construct
  source 1..21: mol_type = other DNA
taaaaaggaagcatgtacagt

SEQ ID NO: 3871-3879 - skipped (9 entries)

SEQ ID NO: 3880 - DNA, 21 bp, synthetic construct
  source 1..21: mol_type = other DNA
tcctatggcaggtcctcatag

SEQ ID NO: 3881-3889 - skipped (9 entries)

SEQ ID NO: 3890 - DNA, 21 bp, synthetic construct
  source 1..21: mol_type = other DNA
tagctggtgccgacaagaaag

SEQ ID NO: 3891-3899 - skipped (9 entries)

SEQ ID NO: 3900 - DNA, 21 bp, synthetic construct
  source 1..21: mol_type = other DNA
actttctagctggtgccgaca

SEQ ID NO: 3901-3909 - skipped (9 entries)

SEQ ID NO: 3910 - DNA, 21 bp, synthetic construct
  source 1..21: mol_type = other DNA
cataggtctggagggtgagcg

SEQ ID NO: 3911-3919 - skipped (9 entries)

SEQ ID NO: 3920 - DNA, 21 bp, synthetic construct
  source 1..21: mol_type = other DNA
atttacataggtctggagggt

SEQ ID NO: 3921-3929 - skipped (9 entries)

SEQ ID NO: 3930 - DNA, 21 bp, synthetic construct
  source 1..21: mol_type = other DNA
tgccttacagtctctcaagtc

SEQ ID NO: 3931-3939 - skipped (9 entries)

SEQ ID NO: 3940 - DNA, 21 bp, synthetic construct
  source 1..21: mol_type = other DNA
ttaccagtcacaagtaataag

SEQ ID NO: 3941-3949 - skipped (9 entries)

SEQ ID NO: 3950 - DNA, 21 bp, synthetic construct
  source 1..21: mol_type = other DNA
gaaatatgagattacggagca

SEQ ID NO: 3951-3959 - skipped (9 entries)

SEQ ID NO: 3960 - DNA, 21 bp, synthetic construct
  source 1..21: mol_type = other DNA
tttagaaatatgagattacgg

SEQ ID NO: 3961-3969 - skipped (9 entries)

SEQ ID NO: 3970 - DNA, 21 bp, synthetic construct
  source 1..21: mol_type = other DNA
tctttatttagaaatatgaga

SEQ ID NO: 3971-3979 - skipped (9 entries)

SEQ ID NO: 3980 - DNA, 21 bp, synthetic construct
  source 1..21: mol_type = other DNA
attttctctttatttagaaat

SEQ ID NO: 3981-3989 - skipped (9 entries)

SEQ ID NO: 3990 - DNA, 21 bp, synthetic construct
  source 1..21: mol_type = other DNA
ccccttaggacctctggtcct

SEQ ID NO: 3991-3999 - skipped (9 entries)

SEQ ID NO: 4000 - DNA, 21 bp, synthetic construct
  source 1..21: mol_type = other DNA
acttacagagggtggttttcc

SEQ ID NO: 4001-4009 - skipped (9 entries)

SEQ ID NO: 4010 - DNA, 21 bp, synthetic construct
  source 1..21: mol_type = other DNA
tttttaacttacagagggtgg

SEQ ID NO: 4011-4019 - skipped (9 entries)

SEQ ID NO: 4020 - DNA, 21 bp, synthetic construct
  source 1..21: mol_type = other DNA
tgtaggtattggcaagcttgc

SEQ ID NO: 4021-4029 - skipped (9 entries)

SEQ ID NO: 4030 - DNA, 21 bp, synthetic construct
  source 1..21: mol_type = other DNA
acactggctgcccggcaggcc

SEQ ID NO: 4031-4039 - skipped (9 entries)

SEQ ID NO: 4040 - DNA, 21 bp, synthetic construct
  source 1..21: mol_type = other DNA
tgtgtaggttacgttatatat

SEQ ID NO: 4041-4049 - skipped (9 entries)

SEQ ID NO: 4050 - DNA, 21 bp, synthetic construct
  source 1..21: mol_type = other DNA
ctattctaggagcgagctgga

SEQ ID NO: 4051-4059 - skipped (9 entries)

SEQ ID NO: 4060 - DNA, 21 bp, synthetic construct
  source 1..21: mol_type = other DNA
cctctgcaacggactgaaggc

SEQ ID NO: 4061-4069 - skipped (9 entries)

SEQ ID NO: 4070 - DNA, 21 bp, synthetic construct
  source 1..21: mol_type = other DNA
ctggccggtcacctcgaaggt

SEQ ID NO: 4071-4079 - skipped (9 entries)

SEQ ID NO: 4080 - DNA, 21 bp, synthetic construct
  source 1..21: mol_type = other DNA
cctgtaggctcatgtagcctc

SEQ ID NO: 4081-4089 - skipped (9 entries)

SEQ ID NO: 4090 - DNA, 21 bp, synthetic construct
  source 1..21: mol_type = other DNA
ctcagtcgccaatatgcagct

SEQ ID NO: 4091-4099 - skipped (9 entries)

SEQ ID NO: 4100 - DNA, 21 bp, synthetic construct
  source 1..21: mol_type = other DNA
tttactcagtcgccaatatgc

SEQ ID NO: 4101-4109 - skipped (9 entries)

SEQ ID NO: 4110 - DNA, 21 bp, synthetic construct
  source 1..21: mol_type = other DNA
ccccctagcgtctgaccaaac

SEQ ID NO: 4111-4119 - skipped (9 entries)

SEQ ID NO: 4120 - DNA, 21 bp, synthetic construct
  source 1..21: mol_type = other DNA
ccccgtacgagcggcgcgcca

SEQ ID NO: 4121-4129 - skipped (9 entries)

SEQ ID NO: 4130 - DNA, 21 bp, synthetic construct
  source 1..21: mol_type = other DNA
ctagtatacctcttcctcttc

SEQ ID NO: 4131-4139 - skipped (9 entries)

SEQ ID NO: 4140 - DNA, 21 bp, synthetic construct
  source 1..21: mol_type = other DNA
ctcaccttggcttccccaaaa

SEQ ID NO: 4141-4149 - skipped (9 entries)

SEQ ID NO: 4150 - DNA, 21 bp, synthetic construct
  source 1..21: mol_type = other DNA
aaatcttaccttccgtgcctt

SEQ ID NO: 4151-4159 - skipped (9 entries)

SEQ ID NO: 4160 - DNA, 21 bp, synthetic construct
  source 1..21: mol_type = other DNA
tctgttacaggaattaacaat

SEQ ID NO: 4161-4169 - skipped (9 entries)

SEQ ID NO: 4170 - DNA, 21 bp, synthetic construct
  source 1..21: mol_type = other DNA
cctctcatctctcaggtcgat

SEQ ID NO: 4171-4179 - skipped (9 entries)

SEQ ID NO: 4180 - DNA, 21 bp, synthetic construct
  source 1..21: mol_type = other DNA
taccctgtagatcgaagattt

SEQ ID NO: 4181-4189 - skipped (9 entries)

SEQ ID NO: 4190 - DNA, 21 bp, synthetic construct
  source 1..21: mol_type = other DNA
ggctatgtccaaactgggtct

SEQ ID NO: 4191-4199 - skipped (9 entries)

SEQ ID NO: 4200 - DNA, 21 bp, synthetic construct
  source 1..21: mol_type = other DNA
tcttctttaggctatgtccaa

SEQ ID NO: 4201-4209 - skipped (9 entries)

SEQ ID NO: 4210 - DNA, 21 bp, synthetic construct
  source 1..21: mol_type = other DNA
tcttcttagctggcggcagca

SEQ ID NO: 4211-4219 - skipped (9 entries)

SEQ ID NO: 4220 - DNA, 21 bp, synthetic construct
  source 1..21: mol_type = other DNA
gacatcaggcttgatggtatc

SEQ ID NO: 4221-4229 - skipped (9 entries)

SEQ ID NO: 4230 - DNA, 21 bp, synthetic construct
  source 1..21: mol_type = other DNA
ccatgctagatgacagaagtg

SEQ ID NO: 4231-4239 - skipped (9 entries)

SEQ ID NO: 4240 - DNA, 21 bp, synthetic construct
  source 1..21: mol_type = other DNA
ttaaattcttctgccctatca

SEQ ID NO: 4241-4249 - skipped (9 entries)

SEQ ID NO: 4250 - DNA, 21 bp, synthetic construct
  source 1..21: mol_type = other DNA
tcttgcagtgtgcccagctgg

SEQ ID NO: 4251-4259 - skipped (9 entries)

SEQ ID NO: 4260 - DNA, 21 bp, synthetic construct
  source 1..21: mol_type = other DNA
tcattgatgataagggtattc

SEQ ID NO: 4261-4269 - skipped (9 entries)

SEQ ID NO: 4270 - DNA, 21 bp, synthetic construct
  source 1..21: mol_type = other DNA
ccaggggcctttttatcattg

SEQ ID NO: 4271-4279 - skipped (9 entries)

SEQ ID NO: 4280 - DNA, 21 bp, synthetic construct
  source 1..21: mol_type = other DNA
atctcttttcccaggggcctt

SEQ ID NO: 4281-4289 - skipped (9 entries)

SEQ ID NO: 4290 - DNA, 21 bp, synthetic construct
  source 1..21: mol_type = other DNA
ctttcatctcttttcccaggg

SEQ ID NO: 4291-4299 - skipped (9 entries)

SEQ ID NO: 4300 - DNA, 21 bp, synthetic construct
  source 1..21: mol_type = other DNA
gtatcagacccgaagcgcacc

SEQ ID NO: 4301-4309 - skipped (9 entries)

SEQ ID NO: 4310 - DNA, 21 bp, synthetic construct
  source 1..21: mol_type = other DNA
ccatagggtcaatacacctaa

SEQ ID NO: 4311-4319 - skipped (9 entries)

SEQ ID NO: 4320 - DNA, 21 bp, synthetic construct
  source 1..21: mol_type = other DNA
ccttttgccatagggtcaata

SEQ ID NO: 4321-4329 - skipped (9 entries)

SEQ ID NO: 4330 - DNA, 21 bp, synthetic construct
  source 1..21: mol_type = other DNA
agtgatagggcagaagaattt

SEQ ID NO: 4331-4339 - skipped (9 entries)

SEQ ID NO: 4340 - DNA, 21 bp, synthetic construct
  source 1..21: mol_type = other DNA
ccctcttgacttcacctttgt

SEQ ID NO: 4341-4349 - skipped (9 entries)

SEQ ID NO: 4350 - DNA, 21 bp, synthetic construct
  source 1..21: mol_type = other DNA
cccccaggaaaatatgttgtg

SEQ ID NO: 4351-4359 - skipped (9 entries)

SEQ ID NO: 4360 - DNA, 21 bp, synthetic construct
  source 1..21: mol_type = other DNA
ccttctcggtcacatactggc

SEQ ID NO: 4361-4369 - skipped (9 entries)

SEQ ID NO: 4370 - DNA, 21 bp, synthetic construct
  source 1..21: mol_type = other DNA
gcccagtccaaggtaacttta

SEQ ID NO: 4371-4379 - skipped (9 entries)

SEQ ID NO: 4380 - DNA, 21 bp, synthetic construct
  source 1..21: mol_type = other DNA
tttccatcaatttcaccgtct

SEQ ID NO: 4381-4389 - skipped (9 entries)

SEQ ID NO: 4390 - DNA, 21 bp, synthetic construct
  source 1..21: mol_type = other DNA
catcaatttcaccgtcttcca

SEQ ID NO: 4391-4399 - skipped (9 entries)

SEQ ID NO: 4400 - DNA, 21 bp, synthetic construct
  source 1..21: mol_type = other DNA
accgtcttccatggcctcctt

SEQ ID NO: 4401-4409 - skipped (9 entries)

SEQ ID NO: 4410 - DNA, 21 bp, synthetic construct
  source 1..21: mol_type = other DNA
gcatcctcctcactgttgaag

SEQ ID NO: 4411-4419 - skipped (9 entries)

SEQ ID NO: 4420 - DNA, 21 bp, synthetic construct
  source 1..21: mol_type = other DNA
gaggacccagtttcccggtca

SEQ ID NO: 4421-4429 - skipped (9 entries)

SEQ ID NO: 4430 - DNA, 21 bp, synthetic construct
  source 1..21: mol_type = other DNA
ccggtcagtaactatccttgc

SEQ ID NO: 4431-4439 - skipped (9 entries)

SEQ ID NO: 4440 - DNA, 21 bp, synthetic construct
  source 1..21: mol_type = other DNA
atgtctcttcagtggtatcct

SEQ ID NO: 4441-4449 - skipped (9 entries)

SEQ ID NO: 4450 - DNA, 21 bp, synthetic construct
  source 1..21: mol_type = other DNA
acaaacagagttttggatggc

SEQ ID NO: 4451-4459 - skipped (9 entries)

SEQ ID NO: 4460 - DNA, 21 bp, synthetic construct
  source 1..21: mol_type = other DNA
gtggcagaggccggggaggct

SEQ ID NO: 4461-4469 - skipped (9 entries)

SEQ ID NO: 4470 - DNA, 21 bp, synthetic construct
  source 1..21: mol_type = other DNA
gaggacgaggtggtggtagag

SEQ ID NO: 4471-4479 - skipped (9 entries)

SEQ ID NO: 4480 - DNA, 21 bp, synthetic construct
  source 1..21: mol_type = other DNA
tagacttcaacagtgaggagg

SEQ ID NO: 4481-4489 - skipped (9 entries)

SEQ ID NO: 4490 - DNA, 21 bp, synthetic construct
  source 1..21: mol_type = other DNA
gttttgtagacttcaacagtg

SEQ ID NO: 4491-4499 - skipped (9 entries)

SEQ ID NO: 4500 - DNA, 21 bp, synthetic construct
  source 1..21: mol_type = other DNA
gtgttctaggtttggttttgt

SEQ ID NO: 4501-4509 - skipped (9 entries)

SEQ ID NO: 4510 - DNA, 21 bp, synthetic construct
  source 1..21: mol_type = other DNA
atttggtgttctaggtttggt

SEQ ID NO: 4511-4519 - skipped (9 entries)

SEQ ID NO: 4520 - DNA, 21 bp, synthetic construct
  source 1..21: mol_type = other DNA
acggctccgttcgggcaagga

SEQ ID NO: 4521-4529 - skipped (9 entries)

SEQ ID NO: 4530 - DNA, 21 bp, synthetic construct
  source 1..21: mol_type = other DNA
tcaaaggcctgtctgaggata

SEQ ID NO: 4531-4539 - skipped (9 entries)

SEQ ID NO: 4540 - DNA, 21 bp, synthetic construct
  source 1..21: mol_type = other DNA
cttcccagagccatccaaaac

SEQ ID NO: 4541-4549 - skipped (9 entries)

SEQ ID NO: 4550 - DNA, 21 bp, synthetic construct
  source 1..21: mol_type = other DNA
tagatgaaagaaacaatcatg

SEQ ID NO: 4551-4559 - skipped (9 entries)

SEQ ID NO: 4560 - DNA, 21 bp, synthetic construct
  source 1..21: mol_type = other DNA
ctcttctccctgactttaggg

SEQ ID NO: 4561-4569 - skipped (9 entries)

SEQ ID NO: 4570 - DNA, 21 bp, synthetic construct
  source 1..21: mol_type = other DNA
gggaactgctcgcagaaagaa

SEQ ID NO: 4571-4579 - skipped (9 entries)

SEQ ID NO: 4580 - DNA, 21 bp, synthetic construct
  source 1..21: mol_type = other DNA
ttttcttaataggtgaatatg

SEQ ID NO: 4581-4589 - skipped (9 entries)

SEQ ID NO: 4590 - DNA, 21 bp, synthetic construct
  source 1..21: mol_type = other DNA
ttaataggtgaatatgtttac

SEQ ID NO: 4591-4599 - skipped (9 entries)

SEQ ID NO: 4600 - DNA, 21 bp, synthetic construct
  source 1..21: mol_type = other DNA
cattttcctttcatagctgtg

SEQ ID NO: 4601-4609 - skipped (9 entries)

SEQ ID NO: 4610 - DNA, 21 bp, synthetic construct
  source 1..21: mol_type = other DNA
ctttcatagctgtggatggaa

SEQ ID NO: 4611-4619 - skipped (9 entries)

SEQ ID NO: 4620 - DNA, 21 bp, synthetic construct
  source 1..21: mol_type = other DNA
atagctgtggatggaaaagca

SEQ ID NO: 4621-4629 - skipped (9 entries)

SEQ ID NO: 4630 - DNA, 21 bp, synthetic construct
  source 1..21: mol_type = other DNA
tactcttttccttttcctaga

SEQ ID NO: 4631-4639 - skipped (9 entries)

SEQ ID NO: 4640 - DNA, 21 bp, synthetic construct
  source 1..21: mol_type = other DNA
cttttcctagatcttgtggag

SEQ ID NO: 4641-4649 - skipped (9 entries)

SEQ ID NO: 4650 - DNA, 21 bp, synthetic construct
  source 1..21: mol_type = other DNA
ctagatcttgtggagaatttt

SEQ ID NO: 4651-4659 - skipped (9 entries)

SEQ ID NO: 4660 - DNA, 21 bp, synthetic construct
  source 1..21: mol_type = other DNA
atacttgcctcttcaatacca

SEQ ID NO: 4661-4669 - skipped (9 entries)

SEQ ID NO: 4670 - DNA, 21 bp, synthetic construct
  source 1..21: mol_type = other DNA
ggggctatcattgtagtgagt

SEQ ID NO: 4671-4679 - skipped (9 entries)

SEQ ID NO: 4680 - DNA, 21 bp, synthetic construct
  source 1..21: mol_type = other DNA
agcccatcaaggcagacccca

SEQ ID NO: 4681-4689 - skipped (9 entries)

SEQ ID NO: 4690 - DNA, 21 bp, synthetic construct
  source 1..21: mol_type = other DNA
agttttggaactccccaaaga

SEQ ID NO: 4691-4699 - skipped (9 entries)

SEQ ID NO: 4700 - DNA, 21 bp, synthetic construct
  source 1..21: mol_type = other DNA
gaactccccaaagagctgtca

SEQ ID NO: 4701-4709 - skipped (9 entries)

SEQ ID NO: 4710 - DNA, 21 bp, synthetic construct
  source 1..21: mol_type = other DNA
cccctctgcttcgtctttctc

SEQ ID NO: 4711-4719 - skipped (9 entries)

SEQ ID NO: 4720 - DNA, 21 bp, synthetic construct
  source 1..21: mol_type = other DNA
tccacccccgggagaccacga

SEQ ID NO: 4721-4729 - skipped (9 entries)

SEQ ID NO: 4730 - DNA, 21 bp, synthetic construct
  source 1..21: mol_type = other DNA
atgtgcctgttctcaacctct

SEQ ID NO: 4731-4739 - skipped (9 entries)

SEQ ID NO: 4740 - DNA, 21 bp, synthetic construct
  source 1..21: mol_type = other DNA
tgacagctctttggggagttc

SEQ ID NO: 4741-4749 - skipped (9 entries)

SEQ ID NO: 4750 - DNA, 21 bp, synthetic construct
  source 1..21: mol_type = other DNA
actaagcttaattgctttctg

SEQ ID NO: 4751-4759 - skipped (9 entries)

SEQ ID NO: 4760 - DNA, 21 bp, synthetic construct
  source 1..21: mol_type = other DNA
tggaacaggatctgaaactgg

SEQ ID NO: 4761-4769 - skipped (9 entries)

SEQ ID NO: 4770 - DNA, 21 bp, synthetic construct
  source 1..21: mol_type = other DNA
tacccatcaacactggtaaga

SEQ ID NO: 4771-4779 - skipped (9 entries)

SEQ ID NO: 4780 - DNA, 21 bp, synthetic construct
  source 1..21: mol_type = other DNA
ttcttttaggatgtggatgta

SEQ ID NO: 4781-4789 - skipped (9 entries)

SEQ ID NO: 4790 - DNA, 21 bp, synthetic construct
  source 1..21: mol_type = other DNA
ggatgtggatgtagaagaggc

SEQ ID NO: 4791-4799 - skipped (9 entries)

SEQ ID NO: 4800 - DNA, 21 bp, synthetic construct
  source 1..21: mol_type = other DNA
ccgccttaaatccacagcata

SEQ ID NO: 4801-4809 - skipped (9 entries)

SEQ ID NO: 4810 - DNA, 21 bp, synthetic construct
  source 1..21: mol_type = other DNA
attaagttctagattttgtgc

SEQ ID NO: 4811-4819 - skipped (9 entries)

SEQ ID NO: 4820 - DNA, 21 bp, synthetic construct
  source 1..21: mol_type = other DNA
tggtttcattaagttctagat

SEQ ID NO: 4821-4829 - skipped (9 entries)

SEQ ID NO: 4830 - DNA, 21 bp, synthetic construct
  source 1..21: mol_type = other DNA
agatcctgttccagaaagcaa

SEQ ID NO: 4831-4839 - skipped (9 entries)

SEQ ID NO: 4840 - DNA, 21 bp, synthetic construct
  source 1..21: mol_type = other DNA
aagtacctgttgggatatcca

SEQ ID NO: 4841-4849 - skipped (9 entries)

SEQ ID NO: 4850 - DNA, 21 bp, synthetic construct
  source 1..21: mol_type = other DNA
tcttttaaagtacctgttggg

SEQ ID NO: 4851-4859 - skipped (9 entries)

SEQ ID NO: 4860 - DNA, 21 bp, synthetic construct
  source 1..21: mol_type = other DNA
agctgatcaaggagatgttca

SEQ ID NO: 4861-4869 - skipped (9 entries)

SEQ ID NO: 4870 - DNA, 21 bp, synthetic construct
  source 1..21: mol_type = other DNA
cttttcagctgatcaaggaga

SEQ ID NO: 4871-4879 - skipped (9 entries)

SEQ ID NO: 4880 - DNA, 21 bp, synthetic construct
  source 1..21: mol_type = other DNA
gcatcattaacagctcaggct

SEQ ID NO: 4881-4889 - skipped (9 entries)

SEQ ID NO: 4890 - DNA, 21 bp, synthetic construct
  source 1..21: mol_type = other DNA
tgaacagtttagcatcattaa

SEQ ID NO: 4891-4899 - skipped (9 entries)

SEQ ID NO: 4900 - DNA, 21 bp, synthetic construct
  source 1..21: mol_type = other DNA
ttgttttctgaacagtttagc

SEQ ID NO: 4901-4909 - skipped (9 entries)

SEQ ID NO: 4910 - DNA, 21 bp, synthetic construct
  source 1..21: mol_type = other DNA
ccggaattgtctcttctttgt

SEQ ID NO: 4911-4919 - skipped (9 entries)

SEQ ID NO: 4920 - DNA, 21 bp, synthetic construct
  source 1..21: mol_type = other DNA
aatttaccggaattgtctctt

SEQ ID NO: 4921-4929 - skipped (9 entries)

SEQ ID NO: 4930 - DNA, 21 bp, synthetic construct
  source 1..21: mol_type = other DNA
tcttttccatgtgatttttta

SEQ ID NO: 4931-4939 - skipped (9 entries)

SEQ ID NO: 4940 - DNA, 21 bp, synthetic construct
  source 1..21: mol_type = other DNA
tttgtcttttccatgtgattt

SEQ ID NO: 4941-4949 - skipped (9 entries)

SEQ ID NO: 4950 - DNA, 21 bp, synthetic construct
  source 1..21: mol_type = other DNA
gacctctccagtgtgttaatg

SEQ ID NO: 4951-4959 - skipped (9 entries)

SEQ ID NO: 4960 - DNA, 21 bp, synthetic construct
  source 1..21: mol_type = other DNA
ttccactttagacctctccag

SEQ ID NO: 4961-4969 - skipped (9 entries)

SEQ ID NO: 4970 - DNA, 21 bp, synthetic construct
  source 1..21: mol_type = other DNA
taaccaagtgctctgtagttt

SEQ ID NO: 4971-4979 - skipped (9 entries)

SEQ ID NO: 4980 - DNA, 21 bp, synthetic construct
  source 1..21: mol_type = other DNA
tcttctaggtctataagaagg

SEQ ID NO: 4981-4989 - skipped (9 entries)

SEQ ID NO: 4990 - DNA, 21 bp, synthetic construct
  source 1..21: mol_type = other DNA
agtaagtgttcacttacgttc

SEQ ID NO: 4991-4999 - skipped (9 entries)

SEQ ID NO: 5000 - DNA, 21 bp, synthetic construct
  source 1..21: mol_type = other DNA
ccttaattcttgcttctcaga

SEQ ID NO: 5001-5009 - skipped (9 entries)

SEQ ID NO: 5010 - DNA, 21 bp, synthetic construct
  source 1..21: mol_type = other DNA
agctgagcaatggacgtggac

SEQ ID NO: 5011-5019 - skipped (9 entries)

SEQ ID NO: 5020 - DNA, 21 bp, synthetic construct
  source 1..21: mol_type = other DNA
aaggacttaaaggagaagaag

SEQ ID NO: 5021-5029 - skipped (9 entries)

SEQ ID NO: 5030 - DNA, 21 bp, synthetic construct
  source 1..21: mol_type = other DNA
tgtcgaggagaatgaggaaaa

SEQ ID NO: 5031-5039 - skipped (9 entries)

SEQ ID NO: 5040 - DNA, 21 bp, synthetic construct
  source 1..21: mol_type = other DNA
attctctccaggtgaggaaga

SEQ ID NO: 5041-5049 - skipped (9 entries)

SEQ ID NO: 5050 - DNA, 21 bp, synthetic construct
  source 1..21: mol_type = other DNA
tctgcttaggatgacgatgtc

SEQ ID NO: 5051-5059 - skipped (9 entries)

SEQ ID NO: 5060 - DNA, 21 bp, synthetic construct
  source 1..21: mol_type = other DNA
gcatccggagaaatgaaaaga

SEQ ID NO: 5061-5069 - skipped (9 entries)

SEQ ID NO: 5070 - DNA, 21 bp, synthetic construct
  source 1..21: mol_type = other DNA
tccacaggtgcgggagtatga

SEQ ID NO: 5071-5079 - skipped (9 entries)

SEQ ID NO: 5080 - DNA, 21 bp, synthetic construct
  source 1..21: mol_type = other DNA
agcatcgcagacaagaagcgc

SEQ ID NO: 5081-5089 - skipped (9 entries)

SEQ ID NO: 5090 - DNA, 21 bp, synthetic construct
  source 1..21: mol_type = other DNA
agtatgatgggatcatccttc

SEQ ID NO: 5091-5099 - skipped (9 entries)

SEQ ID NO: 5100 - DNA, 21 bp, synthetic construct
  source 1..21: mol_type = other DNA
cggatgcgaagttcccgcatg

SEQ ID NO: 5101-5109 - skipped (9 entries)

SEQ ID NO: 5110 - DNA, 21 bp, synthetic construct
  source 1..21: mol_type = other DNA
tccggatgccaaaggatctga

SEQ ID NO: 5111-5119 - skipped (9 entries)

SEQ ID NO: 5120 - DNA, 21 bp, synthetic construct
  source 1..21: mol_type = other DNA
atttctccggatgccaaagga

SEQ ID NO: 5121-5129 - skipped (9 entries)

SEQ ID NO: 5130 - DNA, 21 bp, synthetic construct
  source 1..21: mol_type = other DNA
gacccttctccaagatttctt

SEQ ID NO: 5131-5139 - skipped (9 entries)

SEQ ID NO: 5140 - DNA, 21 bp, synthetic construct
  source 1..21: mol_type = other DNA
ttaactcatactcccgcacct

SEQ ID NO: 5141-5149 - skipped (9 entries)

SEQ ID NO: 5150 - DNA, 21 bp, synthetic construct
  source 1..21: mol_type = other DNA
ccttctgctggaaccagcgca

SEQ ID NO: 5151-5159 - skipped (9 entries)

SEQ ID NO: 5160 - DNA, 21 bp, synthetic construct
  source 1..21: mol_type = other DNA
tctttttttccaacagaattt

SEQ ID NO: 5161-5169 - skipped (9 entries)

SEQ ID NO: 5170 - DNA, 21 bp, synthetic construct
  source 1..21: mol_type = other DNA
caacagaatttgccattttca

SEQ ID NO: 5171-5179 - skipped (9 entries)

SEQ ID NO: 5180 - DNA, 21 bp, synthetic construct
  source 1..21: mol_type = other DNA
ttgaggccctcagcactagtt

SEQ ID NO: 5181-5189 - skipped (9 entries)

SEQ ID NO: 5190 - DNA, 21 bp, synthetic construct
  source 1..21: mol_type = other DNA
cggccagcaggggcatctctg

SEQ ID NO: 5191-5199 - skipped (9 entries)

SEQ ID NO: 5200 - DNA, 21 bp, synthetic construct
  source 1..21: mol_type = other DNA
tgggttacttacattcatggc

SEQ ID NO: 5201-5209 - skipped (9 entries)

SEQ ID NO: 5210 - DNA, 21 bp, synthetic construct
  source 1..21: mol_type = other DNA
tctgcctgcagcctgtggagc

SEQ ID NO: 5211-5219 - skipped (9 entries)

SEQ ID NO: 5220 - DNA, 21 bp, synthetic construct
  source 1..21: mol_type = other DNA
ttctccctacctagccctgga

SEQ ID NO: 5221-5229 - skipped (9 entries)

SEQ ID NO: 5230 - DNA, 21 bp, synthetic construct
  source 1..21: mol_type = other DNA
cattgctccttagatccacat

SEQ ID NO: 5231-5239 - skipped (9 entries)

SEQ ID NO: 5240 - DNA, 21 bp, synthetic construct
  source 1..21: mol_type = other DNA
cctccccaaaaggaagagttc

SEQ ID NO: 5241-5249 - skipped (9 entries)

SEQ ID NO: 5250 - DNA, 21 bp, synthetic construct
  source 1..21: mol_type = other DNA
ctgcggtaatcatgaggataa

SEQ ID NO: 5251-5259 - skipped (9 entries)

SEQ ID NO: 5260 - DNA, 21 bp, synthetic construct
  source 1..21: mol_type = other DNA
agttctgggaaaatggtgtgc

SEQ ID NO: 5261-5269 - skipped (9 entries)

SEQ ID NO: 5270 - DNA, 21 bp, synthetic construct
  source 1..21: mol_type = other DNA
ctttccctagtgaagaacagt

SEQ ID NO: 5271-5279 - skipped (9 entries)

SEQ ID NO: 5280 - DNA, 21 bp, synthetic construct
  source 1..21: mol_type = other DNA
cctagtgaagaacagtccaga

SEQ ID NO: 5281-5289 - skipped (9 entries)

SEQ ID NO: 5290 - DNA, 21 bp, synthetic construct
  source 1..21: mol_type = other DNA
cagctaagttcttggacttca

SEQ ID NO: 5291-5299 - skipped (9 entries)

SEQ ID NO: 5300 - DNA, 21 bp, synthetic construct
  source 1..21: mol_type = other DNA
ctataaggttagaaggccttg

SEQ ID NO: 5301-5309 - skipped (9 entries)

SEQ ID NO: 5310 - DNA, 21 bp, synthetic construct
  source 1..21: mol_type = other DNA
caattttccttctagttatga

SEQ ID NO: 5311-5319 - skipped (9 entries)

SEQ ID NO: 5320 - DNA, 21 bp, synthetic construct
  source 1..21: mol_type = other DNA
cttctagttatgagccagagt

SEQ ID NO: 5321-5329 - skipped (9 entries)

SEQ ID NO: 5330 - DNA, 21 bp, synthetic construct
  source 1..21: mol_type = other DNA
ctggtttaatctacagaatga

SEQ ID NO: 5331-5339 - skipped (9 entries)

SEQ ID NO: 5340 - DNA, 21 bp, synthetic construct
  source 1..21: mol_type = other DNA
atctacagaatgatcaaaccc

SEQ ID NO: 5341-5349 - skipped (9 entries)

SEQ ID NO: 5350 - DNA, 21 bp, synthetic construct
  source 1..21: mol_type = other DNA
tttctggaaaagttgtattaa

SEQ ID NO: 5351-5359 - skipped (9 entries)

SEQ ID NO: 5360 - DNA, 21 bp, synthetic construct
  source 1..21: mol_type = other DNA
tggaaaagttgtattaacagg

SEQ ID NO: 5361-5369 - skipped (9 entries)

SEQ ID NO: 5370 - DNA, 21 bp, synthetic construct
  source 1..21: mol_type = other DNA
ggtcaagtttacaaccaagat

SEQ ID NO: 5371-5379 - skipped (9 entries)

SEQ ID NO: 5380 - DNA, 21 bp, synthetic construct
  source 1..21: mol_type = other DNA
gggcacgaagtgcaatggtct

SEQ ID NO: 5381-5389 - skipped (9 entries)

SEQ ID NO: 5390 - DNA, 21 bp, synthetic construct
  source 1..21: mol_type = other DNA
ccagaactgaaaatcagtgcc

SEQ ID NO: 5391-5399 - skipped (9 entries)

SEQ ID NO: 5400 - DNA, 21 bp, synthetic construct
  source 1..21: mol_type = other DNA
ttacggctacctcttggctcc

SEQ ID NO: 5401-5409 - skipped (9 entries)

SEQ ID NO: 5410 - DNA, 21 bp, synthetic construct
  source 1..21: mol_type = other DNA
ttgctgccagtctggactgtt

SEQ ID NO: 5411-5419 - skipped (9 entries)

SEQ ID NO: 5420 - DNA, 21 bp, synthetic construct
  source 1..21: mol_type = other DNA
agacttacctactaaattgtt

SEQ ID NO: 5421-5429 - skipped (9 entries)

SEQ ID NO: 5430 - DNA, 21 bp, synthetic construct
  source 1..21: mol_type = other DNA
atcattctgtagattaaacca

SEQ ID NO: 5431-5439 - skipped (9 entries)

SEQ ID NO: 5440 - DNA, 21 bp, synthetic construct
  source 1..21: mol_type = other DNA
cagaaacaaaaataaggagaa

SEQ ID NO: 5441-5449 - skipped (9 entries)

SEQ ID NO: 5450 - DNA, 21 bp, synthetic construct
  source 1..21: mol_type = other DNA
aaatgcttcataaatttctgc

SEQ ID NO: 5451-5459 - skipped (9 entries)

SEQ ID NO: 5460 - DNA, 21 bp, synthetic construct
  source 1..21: mol_type = other DNA
ctcagccagcccccaatcttc

SEQ ID NO: 5461-5469 - skipped (9 entries)

SEQ ID NO: 5470 - DNA, 21 bp, synthetic construct
  source 1..21: mol_type = other DNA
tcccaatctgtgtagttagca

SEQ ID NO: 5471-5479 - skipped (9 entries)

SEQ ID NO: 5480 - DNA, 21 bp, synthetic construct
  source 1..21: mol_type = other DNA
gggtaattctccatctgctgc

SEQ ID NO: 5481-5489 - skipped (9 entries)

SEQ ID NO: 5490 - DNA, 21 bp, synthetic construct
  source 1..21: mol_type = other DNA
ggaattgtctttgcctgctgc

SEQ ID NO: 5491-5499 - skipped (9 entries)

SEQ ID NO: 5500 - DNA, 21 bp, synthetic construct
  source 1..21: mol_type = other DNA
cttctaggttttgggaattgt

SEQ ID NO: 5501-5509 - skipped (9 entries)

SEQ ID NO: 5510 - DNA, 21 bp, synthetic construct
  source 1..21: mol_type = other DNA
tgcctgccaccttcagggctg

SEQ ID NO: 5511-5519 - skipped (9 entries)

SEQ ID NO: 5520 - DNA, 21 bp, synthetic construct
  source 1..21: mol_type = other DNA
aacgagaaggcgatccataag

SEQ ID NO: 5521-5529 - skipped (9 entries)

SEQ ID NO: 5530 - DNA, 21 bp, synthetic construct
  source 1..21: mol_type = other DNA
agtgctgtggggctgctaact

SEQ ID NO: 5531-5539 - skipped (9 entries)

SEQ ID NO: 5540 - DNA, 21 bp, synthetic construct
  source 1..21: mol_type = other DNA
ttccctcccccagtttaagtg

SEQ ID NO: 5541-5549 - skipped (9 entries)

SEQ ID NO: 5550 - DNA, 21 bp, synthetic construct
  source 1..21: mol_type = other DNA
ataacaacttccggcagcaga

SEQ ID NO: 5551-5559 - skipped (9 entries)

SEQ ID NO: 5560 - DNA, 21 bp, synthetic construct
  source 1..21: mol_type = other DNA
tgtctcttatcatgttggtgg

SEQ ID NO: 5561-5569 - skipped (9 entries)

SEQ ID NO: 5570 - DNA, 21 bp, synthetic construct
  source 1..21: mol_type = other DNA
ccatctttctgtctcttatca

SEQ ID NO: 5571-5579 - skipped (9 entries)

SEQ ID NO: 5580 - DNA, 21 bp, synthetic construct
  source 1..21: mol_type = other DNA
ctcctgcagtttgccatcttt

SEQ ID NO: 5581-5589 - skipped (9 entries)

SEQ ID NO: 5590 - DNA, 21 bp, synthetic construct
  source 1..21: mol_type = other DNA
tgggctgctgcggggcctgca

SEQ ID NO: 5591-5599 - skipped (9 entries)

SEQ ID NO: 5600 - DNA, 21 bp, synthetic construct
  source 1..21: mol_type = other DNA
tgttttcagaacgacaccgta

SEQ ID NO: 5601-5609 - skipped (9 entries)

SEQ ID NO: 5610 - DNA, 21 bp, synthetic construct
  source 1..21: mol_type = other DNA
agaacgacaccgtaactatcc

SEQ ID NO: 5611-5619 - skipped (9 entries)

SEQ ID NO: 5620 - DNA, 21 bp, synthetic construct
  source 1..21: mol_type = other DNA
ggtcattgatgtccttcaccc

SEQ ID NO: 5621-5629 - skipped (9 entries)

SEQ ID NO: 5630 - DNA, 21 bp, synthetic construct
  source 1..21: mol_type = other DNA
tcattcagcatggcctgtatg

SEQ ID NO: 5631-5639 - skipped (9 entries)

SEQ ID NO: 5640 - DNA, 21 bp, synthetic construct
  source 1..21: mol_type = other DNA
cctcttcttctggattacaga

SEQ ID NO: 5641-5649 - skipped (9 entries)

SEQ ID NO: 5650 - DNA, 21 bp, synthetic construct
  source 1..21: mol_type = other DNA
tagtgcggatagttacggtgt

SEQ ID NO: 5651-5659 - skipped (9 entries)

SEQ ID NO: 5660 - DNA, 21 bp, synthetic construct
  source 1..21: mol_type = other DNA
cttaatgaactataccttttt

SEQ ID NO: 5661-5669 - skipped (9 entries)

SEQ ID NO: 5670 - DNA, 21 bp, synthetic construct
  source 1..21: mol_type = other DNA
gggctgtgcccaaatgagctt

SEQ ID NO: 5671-5679 - skipped (9 entries)

SEQ ID NO: 5680 - DNA, 21 bp, synthetic construct
  source 1..21: mol_type = other DNA
ttccaggaaaatgatgaagtt

SEQ ID NO: 5681-5689 - skipped (9 entries)

SEQ ID NO: 5690 - DNA, 21 bp, synthetic construct
  source 1..21: mol_type = other DNA
tacccaatgacggttgcttga

SEQ ID NO: 5691-5699 - skipped (9 entries)

SEQ ID NO: 5700 - DNA, 21 bp, synthetic construct
  source 1..21: mol_type = other DNA
agaggagttgaagccaaacag

SEQ ID NO: 5701-5709 - skipped (9 entries)

SEQ ID NO: 5710 - DNA, 21 bp, synthetic construct
  source 1..21: mol_type = other DNA
tatttcagaggagttgaagcc

SEQ ID NO: 5711-5719 - skipped (9 entries)

SEQ ID NO: 5720 - DNA, 21 bp, synthetic construct
  source 1..21: mol_type = other DNA
ggcaagtgtcgtggacttcgt

SEQ ID NO: 5721-5729 - skipped (9 entries)

SEQ ID NO: 5730 - DNA, 21 bp, synthetic construct
  source 1..21: mol_type = other DNA
atttttaggcaagtgtcgtgg

SEQ ID NO: 5731-5739 - skipped (9 entries)

SEQ ID NO: 5740 - DNA, 21 bp, synthetic construct
  source 1..21: mol_type = other DNA
tccaggaagttgtccagggca

SEQ ID NO: 5741-5749 - skipped (9 entries)

SEQ ID NO: 5750 - DNA, 21 bp, synthetic construct
  source 1..21: mol_type = other DNA
aggcccttgcgcttgcgggtc

SEQ ID NO: 5751-5759 - skipped (9 entries)

SEQ ID NO: 5760 - DNA, 21 bp, synthetic construct
  source 1..21: mol_type = other DNA
accactggcagatcctgcccg

SEQ ID NO: 5761-5769 - skipped (9 entries)

SEQ ID NO: 5770 - DNA, 21 bp, synthetic construct
  source 1..21: mol_type = other DNA
tggtcaaggcctatctgcccg

SEQ ID NO: 5771-5779 - skipped (9 entries)

SEQ ID NO: 5780 - DNA, 21 bp, synthetic construct
  source 1..21: mol_type = other DNA
aacaggaagcggggccacgtg

SEQ ID NO: 5781-5789 - skipped (9 entries)

SEQ ID NO: 5790 - DNA, 21 bp, synthetic construct
  source 1..21: mol_type = other DNA
ccttctggcagtgtccagagc

SEQ ID NO: 5791-5799 - skipped (9 entries)

SEQ ID NO: 5800 - DNA, 21 bp, synthetic construct
  source 1..21: mol_type = other DNA
tttcccttctggcagtgtcca

SEQ ID NO: 5801-5809 - skipped (9 entries)

SEQ ID NO: 5810 - DNA, 21 bp, synthetic construct
  source 1..21: mol_type = other DNA
cttctcccttctgcagggtga

SEQ ID NO: 5811-5819 - skipped (9 entries)

SEQ ID NO: 5820 - DNA, 21 bp, synthetic construct
  source 1..21: mol_type = other DNA
gcgtgctgggcctggacctct

SEQ ID NO: 5821-5829 - skipped (9 entries)

SEQ ID NO: 5830 - DNA, 21 bp, synthetic construct
  source 1..21: mol_type = other DNA
acaacttcctcatcaccaacg

SEQ ID NO: 5831-5839 - skipped (9 entries)

SEQ ID NO: 5840 - DNA, 21 bp, synthetic construct
  source 1..21: mol_type = other DNA
gcaacgagacgtggggcgtaa

SEQ ID NO: 5841-5849 - skipped (9 entries)

SEQ ID NO: 5850 - DNA, 21 bp, synthetic construct
  source 1..21: mol_type = other DNA
tgggtggatccaagtgccctt

SEQ ID NO: 5851-5859 - skipped (9 entries)

SEQ ID NO: 5860 - DNA, 21 bp, synthetic construct
  source 1..21: mol_type = other DNA
ctccaagtctcacctgccaga

SEQ ID NO: 5861-5869 - skipped (9 entries)

SEQ ID NO: 5870 - DNA, 21 bp, synthetic construct
  source 1..21: mol_type = other DNA
ttacgccccacgtctcgttgc

SEQ ID NO: 5871-5879 - skipped (9 entries)

SEQ ID NO: 5880 - DNA, 21 bp, synthetic construct
  source 1..21: mol_type = other DNA
tccttcatttgtttctctgct

SEQ ID NO: 5881-5889 - skipped (9 entries)

SEQ ID NO: 5890 - DNA, 21 bp, synthetic construct
  source 1..21: mol_type = other DNA
ttgtcttcttcctcctcctta

SEQ ID NO: 5891-5899 - skipped (9 entries)

SEQ ID NO: 5900 - DNA, 21 bp, synthetic construct
  source 1..21: mol_type = other DNA
tcctcatcatcctccttgtcc

SEQ ID NO: 5901-5909 - skipped (9 entries)

SEQ ID NO: 5910 - DNA, 21 bp, synthetic construct
  source 1..21: mol_type = other DNA
tatgcccagggaaggaggcgc

SEQ ID NO: 5911-5919 - skipped (9 entries)

SEQ ID NO: 5920 - DNA, 21 bp, synthetic construct
  source 1..21: mol_type = other DNA
aggcttattcaaacctcctta

SEQ ID NO: 5921-5929 - skipped (9 entries)

SEQ ID NO: 5930 - DNA, 21 bp, synthetic construct
  source 1..21: mol_type = other DNA
aggtgagctccaaggaagtga

SEQ ID NO: 5931-5939 - skipped (9 entries)

SEQ ID NO: 5940 - DNA, 21 bp, synthetic construct
  source 1..21: mol_type = other DNA
cttctttttcaggtgagctcc

SEQ ID NO: 5941-5949 - skipped (9 entries)

SEQ ID NO: 5950 - DNA, 21 bp, synthetic construct
  source 1..21: mol_type = other DNA
cttcagatgacggtcgaacca

SEQ ID NO: 5951-5959 - skipped (9 entries)

SEQ ID NO: 5960 - DNA, 21 bp, synthetic construct
  source 1..21: mol_type = other DNA
cagaagtgccggacgtcgggc

SEQ ID NO: 5961-5969 - skipped (9 entries)

SEQ ID NO: 5970 - DNA, 21 bp, synthetic construct
  source 1..21: mol_type = other DNA
cagttcctgacggagctgacc

SEQ ID NO: 5971-5979 - skipped (9 entries)

SEQ ID NO: 5980 - DNA, 21 bp, synthetic construct
  source 1..21: mol_type = other DNA
tttcggatcttctcgccctca

SEQ ID NO: 5981-5989 - skipped (9 entries)

SEQ ID NO: 5990 - DNA, 21 bp, synthetic construct
  source 1..21: mol_type = other DNA
ggatcttctcgccctcagagc

SEQ ID NO: 5991-5999 - skipped (9 entries)

SEQ ID NO: 6000 - DNA, 21 bp, synthetic construct
  source 1..21: mol_type = other DNA
tctacattgcctacagtgacg

SEQ ID NO: 6001-6009 - skipped (9 entries)

SEQ ID NO: 6010 - DNA, 21 bp, synthetic construct
  source 1..21: mol_type = other DNA
atcccaggaacaccatgaaga

SEQ ID NO: 6011-6019 - skipped (9 entries)

SEQ ID NO: 6020 - DNA, 21 bp, synthetic construct
  source 1..21: mol_type = other DNA
tgctttcatcccaggaacacc

SEQ ID NO: 6021-6029 - skipped (9 entries)

SEQ ID NO: 6030 - DNA, 21 bp, synthetic construct
  source 1..21: mol_type = other DNA
tcaacaatgtcattccaccca

SEQ ID NO: 6031-6039 - skipped (9 entries)

SEQ ID NO: 6040 - DNA, 21 bp, synthetic construct
  source 1..21: mol_type = other DNA
tttgtcaacaatgtcattcca

SEQ ID NO: 6041-6049 - skipped (9 entries)

SEQ ID NO: 6050 - DNA, 21 bp, synthetic construct
  source 1..21: mol_type = other DNA
cagttggtcagttctacttct

SEQ ID NO: 6051-6059 - skipped (9 entries)

SEQ ID NO: 6060 - DNA, 21 bp, synthetic construct
  source 1..21: mol_type = other DNA
ttgcatcttgtatcttttgca

SEQ ID NO: 6061-6069 - skipped (9 entries)

SEQ ID NO: 6070 - DNA, 21 bp, synthetic construct
  source 1..21: mol_type = other DNA
tcaggtgatagtagaaaaggc

SEQ ID NO: 6071-6079 - skipped (9 entries)

SEQ ID NO: 6080 - DNA, 21 bp, synthetic construct
  source 1..21: mol_type = other DNA
atctctttatcaggtgatagt

SEQ ID NO: 6081-6089 - skipped (9 entries)

SEQ ID NO: 6090 - DNA, 21 bp, synthetic construct
  source 1..21: mol_type = other DNA
ataatctgccactcttggcag

SEQ ID NO: 6091-6099 - skipped (9 entries)

SEQ ID NO: 6100 - DNA, 21 bp, synthetic construct
  source 1..21: mol_type = other DNA
taacccagattgaaaaagaag

SEQ ID NO: 6101-6109 - skipped (9 entries)

SEQ ID NO: 6110 - DNA, 21 bp, synthetic construct
  source 1..21: mol_type = other DNA
gtattctcttaacagaagact

SEQ ID NO: 6111-6119 - skipped (9 entries)

SEQ ID NO: 6120 - DNA, 21 bp, synthetic construct
  source 1..21: mol_type = other DNA
gagaagcttacctcttcagga

SEQ ID NO: 6121-6129 - skipped (9 entries)

SEQ ID NO: 6130 - DNA, 21 bp, synthetic construct
  source 1..21: mol_type = other DNA
aattatttattacagtatttt

SEQ ID NO: 6131-6139 - skipped (9 entries)

SEQ ID NO: 6140 - DNA, 21 bp, synthetic construct
  source 1..21: mol_type = other DNA
ttacagtattttgatgaaaat

SEQ ID NO: 6141-6149 - skipped (9 entries)

SEQ ID NO: 6150 - DNA, 21 bp, synthetic construct
  source 1..21: mol_type = other DNA
ggatttgacgaaacgttcgag

SEQ ID NO: 6151-6159 - skipped (9 entries)

SEQ ID NO: 6160 - DNA, 21 bp, synthetic construct
  source 1..21: mol_type = other DNA
acgaaacgttcgagtcaaacg

SEQ ID NO: 6161-6169 - skipped (9 entries)

SEQ ID NO: 6170 - DNA, 21 bp, synthetic construct
  source 1..21: mol_type = other DNA
aggttcccgatatggatgatg

SEQ ID NO: 6171-6179 - skipped (9 entries)

SEQ ID NO: 6180 - DNA, 21 bp, synthetic construct
  source 1..21: mol_type = other DNA
tttcaggaggatgaaggagaa

SEQ ID NO: 6181-6189 - skipped (9 entries)

SEQ ID NO: 6190 - DNA, 21 bp, synthetic construct
  source 1..21: mol_type = other DNA
aggaggatgaaggagaagatg

SEQ ID NO: 6191-6199 - skipped (9 entries)

SEQ ID NO: 6200 - DNA, 21 bp, synthetic construct
  source 1..21: mol_type = other DNA
ttttacctctccttcctcccc

SEQ ID NO: 6201-6209 - skipped (9 entries)

SEQ ID NO: 6210 - DNA, 21 bp, synthetic construct
  source 1..21: mol_type = other DNA
gccaaattttcttttacctct

SEQ ID NO: 6211-6219 - skipped (9 entries)

SEQ ID NO: 6220 - DNA, 21 bp, synthetic construct
  source 1..21: mol_type = other DNA
cagaccacagtccatgccatc

SEQ ID NO: 6221-6229 - skipped (9 entries)

SEQ ID NO: 6230 - DNA, 21 bp, synthetic construct
  source 1..21: mol_type = other DNA
atcttctaggtatgacaacga

SEQ ID NO: 6231-6239 - skipped (9 entries)

SEQ ID NO: 6240 - DNA, 21 bp, synthetic construct
  source 1..21: mol_type = other DNA
tttgttgtaggaggataagat

SEQ ID NO: 6241-6249 - skipped (9 entries)

SEQ ID NO: 6250 - DNA, 21 bp, synthetic construct
  source 1..21: mol_type = other DNA
ttgtaggaggataagatcaat

SEQ ID NO: 6251-6259 - skipped (9 entries)

SEQ ID NO: 6260 - DNA, 21 bp, synthetic construct
  source 1..21: mol_type = other DNA
tagctgaggagaagaaagtgg

SEQ ID NO: 6261-6269 - skipped (9 entries)

SEQ ID NO: 6270 - DNA, 21 bp, synthetic construct
  source 1..21: mol_type = other DNA
ccaccatcaccttacctttgc

SEQ ID NO: 6271-6279 - skipped (9 entries)

SEQ ID NO: 6280 - DNA, 21 bp, synthetic construct
  source 1..21: mol_type = other DNA
ctacctggagcagcagcagtg

SEQ ID NO: 6281-6289 - skipped (9 entries)

SEQ ID NO: 6290 - DNA, 21 bp, synthetic construct
  source 1..21: mol_type = other DNA
ctcttaaggggcgcagactcg

SEQ ID NO: 6291-6299 - skipped (9 entries)

SEQ ID NO: 6300 - DNA, 21 bp, synthetic construct
  source 1..21: mol_type = other DNA
tagggatcaagcatgaattgc

SEQ ID NO: 6301-6309 - skipped (9 entries)

SEQ ID NO: 6310 - DNA, 21 bp, synthetic construct
  source 1..21: mol_type = other DNA
ttctttatagggatcaagcat

SEQ ID NO: 6311-6319 - skipped (9 entries)

SEQ ID NO: 6320 - DNA, 21 bp, synthetic construct
  source 1..21: mol_type = other DNA
tgtccagggcccccgagtctg

SEQ ID NO: 6321-6329 - skipped (9 entries)

SEQ ID NO: 6330 - DNA, 21 bp, synthetic construct
  source 1..21: mol_type = other DNA
ctcttggtctcccgcagcccg

SEQ ID NO: 6331-6339 - skipped (9 entries)

SEQ ID NO: 6340 - DNA, 21 bp, synthetic construct
  source 1..21: mol_type = other DNA
cattatttattttaacccact

SEQ ID NO: 6341-6349 - skipped (9 entries)

SEQ ID NO: 6350 - DNA, 21 bp, synthetic construct
  source 1..21: mol_type = other DNA
ttttaacccacttccttgtac

SEQ ID NO: 6351-6359 - skipped (9 entries)

SEQ ID NO: 6360 - DNA, 21 bp, synthetic construct
  source 1..21: mol_type = other DNA
acccacttccttgtacttaca

SEQ ID NO: 6361-6369 - skipped (9 entries)

SEQ ID NO: 6370 - DNA, 21 bp, synthetic construct
  source 1..21: mol_type = other DNA
cctggtagtttttgaaattag

SEQ ID NO: 6371-6379 - skipped (9 entries)

SEQ ID NO: 6380 - DNA, 21 bp, synthetic construct
  source 1..21: mol_type = other DNA
gaaatggaaaaatgtgtaagt

SEQ ID NO: 6381-6389 - skipped (9 entries)

SEQ ID NO: 6390 - DNA, 21 bp, synthetic construct
  source 1..21: mol_type = other DNA
cttcccaagttctttattggt

SEQ ID NO: 6391-6399 - skipped (9 entries)

SEQ ID NO: 6400 - DNA, 21 bp, synthetic construct
  source 1..21: mol_type = other DNA
tttgcttcccaagttctttat

SEQ ID NO: 6401-6409 - skipped (9 entries)

SEQ ID NO: 6410 - DNA, 21 bp, synthetic construct
  source 1..21: mol_type = other DNA
gaatcaaagggaaacttgaag

SEQ ID NO: 6411-6419 - skipped (9 entries)

SEQ ID NO: 6420 - DNA, 21 bp, synthetic construct
  source 1..21: mol_type = other DNA
ttaatgcagatggtcagtagg

SEQ ID NO: 6421-6429 - skipped (9 entries)

SEQ ID NO: 6430 - DNA, 21 bp, synthetic construct
  source 1..21: mol_type = other DNA
ctacctttcatctcgccttta

SEQ ID NO: 6431-6439 - skipped (9 entries)

SEQ ID NO: 6440 - DNA, 21 bp, synthetic construct
  source 1..21: mol_type = other DNA
ttgttcactatgactcctgca

SEQ ID NO: 6441-6449 - skipped (9 entries)

SEQ ID NO: 6450 - DNA, 21 bp, synthetic construct
  source 1..21: mol_type = other DNA
ctcacccttttttctgagctc

SEQ ID NO: 6451-6459 - skipped (9 entries)

SEQ ID NO: 6460 - DNA, 21 bp, synthetic construct
  source 1..21: mol_type = other DNA
atgcaggttctgccattacag

SEQ ID NO: 6461-6469 - skipped (9 entries)

SEQ ID NO: 6470 - DNA, 21 bp, synthetic construct
  source 1..21: mol_type = other DNA
tttttttaatgcaggttctgc

SEQ ID NO: 6471-6479 - skipped (9 entries)

SEQ ID NO: 6480 - DNA, 21 bp, synthetic construct
  source 1..21: mol_type = other DNA
ttctctcagtacatccagcag

SEQ ID NO: 6481-6489 - skipped (9 entries)

SEQ ID NO: 6490 - DNA, 21 bp, synthetic construct
  source 1..21: mol_type = other DNA
actttctaggtcccgaacccc

SEQ ID NO: 6491-6499 - skipped (9 entries)

SEQ ID NO: 6500 - DNA, 21 bp, synthetic construct
  source 1..21: mol_type = other DNA
taggtcccgaacccctggtaa

SEQ ID NO: 6501-6509 - skipped (9 entries)

SEQ ID NO: 6510 - DNA, 21 bp, synthetic construct
  source 1..21: mol_type = other DNA
ttatgcaggttcgtgctgtaa

SEQ ID NO: 6511-6519 - skipped (9 entries)

SEQ ID NO: 6520 - DNA, 21 bp, synthetic construct
  source 1..21: mol_type = other DNA
gtattttcctttctaggatca

SEQ ID NO: 6521-6529 - skipped (9 entries)

SEQ ID NO: 6530 - DNA, 21 bp, synthetic construct
  source 1..21: mol_type = other DNA
ctttctaggatcaagcgtgct

SEQ ID NO: 6531-6539 - skipped (9 entries)

SEQ ID NO: 6540 - DNA, 21 bp, synthetic construct
  source 1..21: mol_type = other DNA
taggatcaagcgtgctttcct

SEQ ID NO: 6541-6549 - skipped (9 entries)

SEQ ID NO: 6550 - DNA, 21 bp, synthetic construct
  source 1..21: mol_type = other DNA
agaaatacttacagcctagtt

SEQ ID NO: 6551-6559 - skipped (9 entries)

SEQ ID NO: 6560 - DNA, 21 bp, synthetic construct
  source 1..21: mol_type = other DNA
acttacctgtcacgaacacat

SEQ ID NO: 6561-6569 - skipped (9 entries)

SEQ ID NO: 6570 - DNA, 21 bp, synthetic construct
  source 1..21: mol_type = other DNA
agcatttaacttacctgtcac

SEQ ID NO: 6571-6579 - skipped (9 entries)

SEQ ID NO: 6580 - DNA, 21 bp, synthetic construct
  source 1..21: mol_type = other DNA
tctttcagaatgttggctacc

SEQ ID NO: 6581-6589 - skipped (9 entries)

SEQ ID NO: 6590 - DNA, 21 bp, synthetic construct
  source 1..21: mol_type = other DNA
agaatgttggctaccagggta

SEQ ID NO: 6591-6599 - skipped (9 entries)

SEQ ID NO: 6600 - DNA, 21 bp, synthetic construct
  source 1..21: mol_type = other DNA
cacctctgtgtgtgtacgagc

SEQ ID NO: 6601-6609 - skipped (9 entries)

SEQ ID NO: 6610 - DNA, 21 bp, synthetic construct
  source 1..21: mol_type = other DNA
ttcaatatgtttttcagaaag

SEQ ID NO: 6611-6619 - skipped (9 entries)

SEQ ID NO: 6620 - DNA, 21 bp, synthetic construct
  source 1..21: mol_type = other DNA
agaaagtgttgtgaagagcga

SEQ ID NO: 6621-6629 - skipped (9 entries)

SEQ ID NO: 6630 - DNA, 21 bp, synthetic construct
  source 1..21: mol_type = other DNA
gctcccagcttatatggatcg

SEQ ID NO: 6631-6639 - skipped (9 entries)

SEQ ID NO: 6640 - DNA, 21 bp, synthetic construct
  source 1..21: mol_type = other DNA
ctgagatgaacaggggctcga

SEQ ID NO: 6641-6649 - skipped (9 entries)

SEQ ID NO: 6650 - DNA, 21 bp, synthetic construct
  source 1..21: mol_type = other DNA
accgcgctcgttatcatgtgg

SEQ ID NO: 6651-6659 - skipped (9 entries)

SEQ ID NO: 6660 - DNA, 21 bp, synthetic construct
  source 1..21: mol_type = other DNA
acaaagagtgggtggccaagc

SEQ ID NO: 6661-6669 - skipped (9 entries)

SEQ ID NO: 6670 - DNA, 21 bp, synthetic construct
  source 1..21: mol_type = other DNA
tcaaagctttgcgggaggggg

SEQ ID NO: 6671-6679 - skipped (9 entries)

SEQ ID NO: 6680 - DNA, 21 bp, synthetic construct
  source 1..21: mol_type = other DNA
gtagtcccacttggaggctaa

SEQ ID NO: 6681-6689 - skipped (9 entries)

SEQ ID NO: 6690 - DNA, 21 bp, synthetic construct
  source 1..21: mol_type = other DNA
tccttgctctctgcagaaatg

SEQ ID NO: 6691-6699 - skipped (9 entries)

SEQ ID NO: 6700 - DNA, 21 bp, synthetic construct
  source 1..21: mol_type = other DNA
gaacattgatgatggcacctc

SEQ ID NO: 6701-6709 - skipped (9 entries)

SEQ ID NO: 6710 - DNA, 21 bp, synthetic construct
  source 1..21: mol_type = other DNA
tccccaggtactctgtggata

SEQ ID NO: 6711-6719 - skipped (9 entries)

SEQ ID NO: 6720 - DNA, 21 bp, synthetic construct
  source 1..21: mol_type = other DNA
ccttctagatacaagacaggc

SEQ ID NO: 6721-6729 - skipped (9 entries)

SEQ ID NO: 6730 - DNA, 21 bp, synthetic construct
  source 1..21: mol_type = other DNA
cgtccggagtagcgtccagcc

SEQ ID NO: 6731-6739 - skipped (9 entries)

SEQ ID NO: 6740 - DNA, 21 bp, synthetic construct
  source 1..21: mol_type = other DNA
tctttgatctcttggcgatct

SEQ ID NO: 6741-6749 - skipped (9 entries)

SEQ ID NO: 6750 - DNA, 21 bp, synthetic construct
  source 1..21: mol_type = other DNA
acaaaagattttatctttgat

SEQ ID NO: 6751-6759 - skipped (9 entries)

SEQ ID NO: 6760 - DNA, 21 bp, synthetic construct
  source 1..21: mol_type = other DNA
gaggctttgtgttcatttcgc

SEQ ID NO: 6761-6769 - skipped (9 entries)

SEQ ID NO: 6770 - DNA, 21 bp, synthetic construct
  source 1..21: mol_type = other DNA
tgttcatttcgccctaggccc

SEQ ID NO: 6771-6779 - skipped (9 entries)

SEQ ID NO: 6780 - DNA, 21 bp, synthetic construct
  source 1..21: mol_type = other DNA
gccctaggccccttctcgatg

SEQ ID NO: 6781-6789 - skipped (9 entries)

SEQ ID NO: 6790 - DNA, 21 bp, synthetic construct
  source 1..21: mol_type = other DNA
caatgtcctttccccggagct

SEQ ID NO: 6791-6799 - skipped (9 entries)

SEQ ID NO: 6800 - DNA, 21 bp, synthetic construct
  source 1..21: mol_type = other DNA
ccaagcacctggttattgggt

SEQ ID NO: 6801-6809 - skipped (9 entries)

SEQ ID NO: 6810 - DNA, 21 bp, synthetic construct
  source 1..21: mol_type = other DNA
ttggaagtctccacatcttct

SEQ ID NO: 6811-6819 - skipped (9 entries)

SEQ ID NO: 6820 - DNA, 21 bp, synthetic construct
  source 1..21: mol_type = other DNA
gcctgggcggccgtagggccc

SEQ ID NO: 6821-6829 - skipped (9 entries)

SEQ ID NO: 6830 - DNA, 21 bp, synthetic construct
  source 1..21: mol_type = other DNA
aggcctcaagctccggggaaa

SEQ ID NO: 6831-6839 - skipped (9 entries)

SEQ ID NO: 6840 - DNA, 21 bp, synthetic construct
  source 1..21: mol_type = other DNA
gaaaatcaatgagaagccaca

SEQ ID NO: 6841-6849 - skipped (9 entries)

SEQ ID NO: 6850 - DNA, 21 bp, synthetic construct
  source 1..21: mol_type = other DNA
cctcacaccgactccaggggc

SEQ ID NO: 6851-6859 - skipped (9 entries)

SEQ ID NO: 6860 - DNA, 21 bp, synthetic construct
  source 1..21: mol_type = other DNA
taggctatcttagcggcacag

SEQ ID NO: 6861-6869 - skipped (9 entries)

SEQ ID NO: 6870 - DNA, 21 bp, synthetic construct
  source 1..21: mol_type = other DNA
taattttctaggctatcttag

SEQ ID NO: 6871-6879 - skipped (9 entries)

SEQ ID NO: 6880 - DNA, 21 bp, synthetic construct
  source 1..21: mol_type = other DNA
aaagaaaaatgcttaaatttc

SEQ ID NO: 6881-6889 - skipped (9 entries)

SEQ ID NO: 6890 - DNA, 21 bp, synthetic construct
  source 1..21: mol_type = other DNA
agaatgagcaagattcacttt

SEQ ID NO: 6891-6899 - skipped (9 entries)

SEQ ID NO: 6900 - DNA, 21 bp, synthetic construct
  source 1..21: mol_type = other DNA
taggtagaggccctgcttctt

SEQ ID NO: 6901-6909 - skipped (9 entries)

SEQ ID NO: 6910 - DNA, 21 bp, synthetic construct
  source 1..21: mol_type = other DNA
gatctaacaaccacaagagaa

SEQ ID NO: 6911-6919 - skipped (9 entries)

SEQ ID NO: 6920 - DNA, 21 bp, synthetic construct
  source 1..21: mol_type = other DNA
gcttttgttcattcataaact

SEQ ID NO: 6921-6929 - skipped (9 entries)

SEQ ID NO: 6930 - DNA, 21 bp, synthetic construct
  source 1..21: mol_type = other DNA
ttcattcataaactccaagtc

SEQ ID NO: 6931-6939 - skipped (9 entries)

SEQ ID NO: 6940 - DNA, 21 bp, synthetic construct
  source 1..21: mol_type = other DNA
cctcagagggaacatactgct

SEQ ID NO: 6941-6949 - skipped (9 entries)

SEQ ID NO: 6950 - DNA, 21 bp, synthetic construct
  source 1..21: mol_type = other DNA
tccatcttcaagaaaattcct

SEQ ID NO: 6951-6959 - skipped (9 entries)

SEQ ID NO: 6960 - DNA, 21 bp, synthetic construct
  source 1..21: mol_type = other DNA
cttagagatgattctctcaaa

SEQ ID NO: 6961-6969 - skipped (9 entries)

SEQ ID NO: 6970 - DNA, 21 bp, synthetic construct
  source 1..21: mol_type = other DNA
taggctcctgctccaaatgtg

SEQ ID NO: 6971-6979 - skipped (9 entries)

SEQ ID NO: 6980 - DNA, 21 bp, synthetic construct
  source 1..21: mol_type = other DNA
cgtcatcggcttgaagataaa

SEQ ID NO: 6981-6989 - skipped (9 entries)

SEQ ID NO: 6990 - DNA, 21 bp, synthetic construct
  source 1..21: mol_type = other DNA
tgaatgaacaaaagctaaaca

SEQ ID NO: 6991-6999 - skipped (9 entries)

SEQ ID NO: 7000 - DNA, 21 bp, synthetic construct
  source 1..21: mol_type = other DNA
cagaagctgagtatctatggt

SEQ ID NO: 7001-7009 - skipped (9 entries)

SEQ ID NO: 7010 - DNA, 21 bp, synthetic construct
  source 1..21: mol_type = other DNA
ttttgcagaagctgagtatct

SEQ ID NO: 7011-7019 - skipped (9 entries)

SEQ ID NO: 7020 - DNA, 21 bp, synthetic construct
  source 1..21: mol_type = other DNA
ttgtgcaactgttgctacagc

SEQ ID NO: 7021-7029 - skipped (9 entries)

SEQ ID NO: 7030 - DNA, 21 bp, synthetic construct
  source 1..21: mol_type = other DNA
gatttgttgtgcaactgttgc

SEQ ID NO: 7031-7039 - skipped (9 entries)

SEQ ID NO: 7040 - DNA, 21 bp, synthetic construct
  source 1..21: mol_type = other DNA
actacaactcttgtcctctcg

SEQ ID NO: 7041-7049 - skipped (9 entries)

SEQ ID NO: 7050 - DNA, 21 bp, synthetic construct
  source 1..21: mol_type = other DNA
cagtaactctgggtggatttt

SEQ ID NO: 7051-7059 - skipped (9 entries)

SEQ ID NO: 7060 - DNA, 21 bp, synthetic construct
  source 1..21: mol_type = other DNA
ttgaagatggagaaagtgatg

SEQ ID NO: 7061-7069 - skipped (9 entries)

SEQ ID NO: 7070 - DNA, 21 bp, synthetic construct
  source 1..21: mol_type = other DNA
agcagatctgcaaatgagaaa

SEQ ID NO: 7071-7079 - skipped (9 entries)

SEQ ID NO: 7080 - DNA, 21 bp, synthetic construct
  source 1..21: mol_type = other DNA
agagaatcatctctaagcaaa

SEQ ID NO: 7081-7089 - skipped (9 entries)

SEQ ID NO: 7090 - DNA, 21 bp, synthetic construct
  source 1..21: mol_type = other DNA
gagcaggagcctacaaatttg

SEQ ID NO: 7091-7099 - skipped (9 entries)

SEQ ID NO: 7100 - DNA, 21 bp, synthetic construct
  source 1..21: mol_type = other DNA
gtctaagccagaaatccagta

SEQ ID NO: 7101-7109 - skipped (9 entries)

SEQ ID NO: 7110 - DNA, 21 bp, synthetic construct
  source 1..21: mol_type = other DNA
attattattttagtctaagcc

SEQ ID NO: 7111-7119 - skipped (9 entries)

SEQ ID NO: 7120 - DNA, 21 bp, synthetic construct
  source 1..21: mol_type = other DNA
tcttcaagccgatgacggaaa

SEQ ID NO: 7121-7129 - skipped (9 entries)

SEQ ID NO: 7130 - DNA, 21 bp, synthetic construct
  source 1..21: mol_type = other DNA
tcttttccaggaatttgacaa

SEQ ID NO: 7131-7139 - skipped (9 entries)

SEQ ID NO: 7140 - DNA, 21 bp, synthetic construct
  source 1..21: mol_type = other DNA
caggaatttgacaagaagtac

SEQ ID NO: 7141-7149 - skipped (9 entries)

SEQ ID NO: 7150 - DNA, 21 bp, synthetic construct
  source 1..21: mol_type = other DNA
atgtgtcacataactaccgaa

SEQ ID NO: 7151-7159 - skipped (9 entries)

SEQ ID NO: 7160 - DNA, 21 bp, synthetic construct
  source 1..21: mol_type = other DNA
tttcttaggaacatcattcat

SEQ ID NO: 7161-7169 - skipped (9 entries)

SEQ ID NO: 7170 - DNA, 21 bp, synthetic construct
  source 1..21: mol_type = other DNA
ttaggaacatcattcatggca

SEQ ID NO: 7171-7179 - skipped (9 entries)

SEQ ID NO: 7180 - DNA, 21 bp, synthetic construct
  source 1..21: mol_type = other DNA
gctgatggcaacacctcatag

SEQ ID NO: 7181-7189 - skipped (9 entries)

SEQ ID NO: 7190 - DNA, 21 bp, synthetic construct
  source 1..21: mol_type = other DNA
tgttttctaggagttggcctg

SEQ ID NO: 7191-7199 - skipped (9 entries)

SEQ ID NO: 7200 - DNA, 21 bp, synthetic construct
  source 1..21: mol_type = other DNA
taggagttggcctgggccctg

SEQ ID NO: 7201-7209 - skipped (9 entries)

SEQ ID NO: 7210 - DNA, 21 bp, synthetic construct
  source 1..21: mol_type = other DNA
tattgctgtcaaccccaggta

SEQ ID NO: 7211-7219 - skipped (9 entries)

SEQ ID NO: 7220 - DNA, 21 bp, synthetic construct
  source 1..21: mol_type = other DNA
taacagcatccttcccactgc

SEQ ID NO: 7221-7229 - skipped (9 entries)

SEQ ID NO: 7230 - DNA, 21 bp, synthetic construct
  source 1..21: mol_type = other DNA
atgggcacggcaatgatcttt

SEQ ID NO: 7231-7239 - skipped (9 entries)

SEQ ID NO: 7240 - DNA, 21 bp, synthetic construct
  source 1..21: mol_type = other DNA
cctgcttcaccctcagtgcac

SEQ ID NO: 7241-7249 - skipped (9 entries)

SEQ ID NO: 7250 - DNA, 21 bp, synthetic construct
  source 1..21: mol_type = other DNA
ctgtgtcttataggtatcttg

SEQ ID NO: 7251-7259 - skipped (9 entries)

SEQ ID NO: 7260 - DNA, 21 bp, synthetic construct
  source 1..21: mol_type = other DNA
tcttccctggggaatgttttc

SEQ ID NO: 7261-7269 - skipped (9 entries)

SEQ ID NO: 7270 - DNA, 21 bp, synthetic construct
  source 1..21: mol_type = other DNA
gatccatttggcttttccagg

SEQ ID NO: 7271-7279 - skipped (9 entries)

SEQ ID NO: 7280 - DNA, 21 bp, synthetic construct
  source 1..21: mol_type = other DNA
ttaggcaaacctgtatgtggg

SEQ ID NO: 7281-7289 - skipped (9 entries)

SEQ ID NO: 7290 - DNA, 21 bp, synthetic construct
  source 1..21: mol_type = other DNA
atactcaactcattattgaaa

SEQ ID NO: 7291-7299 - skipped (9 entries)

SEQ ID NO: 7300 - DNA, 21 bp, synthetic construct
  source 1..21: mol_type = other DNA
aggcactgcattgatctcttc

SEQ ID NO: 7301-7309 - skipped (9 entries)

SEQ ID NO: 7310 - DNA, 21 bp, synthetic construct
  source 1..21: mol_type = other DNA
attactgtcttcagaaaactc

SEQ ID NO: 7311-7319 - skipped (9 entries)

SEQ ID NO: 7320 - DNA, 21 bp, synthetic construct
  source 1..21: mol_type = other DNA
tccatttctaggataagaaga

SEQ ID NO: 7321-7329 - skipped (9 entries)

SEQ ID NO: 7330 - DNA, 21 bp, synthetic construct
  source 1..21: mol_type = other DNA
taggataagaagaaagagaag

SEQ ID NO: 7331-7339 - skipped (9 entries)

SEQ ID NO: 7340 - DNA, 21 bp, synthetic construct
  source 1..21: mol_type = other DNA
atggctatgaggtgttgccat

SEQ ID NO: 7341-7349 - skipped (9 entries)

SEQ ID NO: 7350 - DNA, 21 bp, synthetic construct
  source 1..21: mol_type = other DNA
tgttcagtttcatggctatga

SEQ ID NO: 7351-7359 - skipped (9 entries)

SEQ ID NO: 7360 - DNA, 21 bp, synthetic construct
  source 1..21: mol_type = other DNA
ccagttcacacttacctccca

SEQ ID NO: 7361-7369 - skipped (9 entries)

SEQ ID NO: 7370 - DNA, 21 bp, synthetic construct
  source 1..21: mol_type = other DNA
aataatgagttgagtatcaaa

SEQ ID NO: 7371-7379 - skipped (9 entries)

SEQ ID NO: 7380 - DNA, 21 bp, synthetic construct
  source 1..21: mol_type = other DNA
tgaagacagtaatgaaatcta

SEQ ID NO: 7381-7389 - skipped (9 entries)

SEQ ID NO: 7390 - DNA, 21 bp, synthetic construct
  source 1..21: mol_type = other DNA
attcatggccaggatcatcat

SEQ ID NO: 7391-7399 - skipped (9 entries)

SEQ ID NO: 7400 - DNA, 21 bp, synthetic construct
  source 1..21: mol_type = other DNA
ggttgtaggctaactaacctt

SEQ ID NO: 7401-7409 - skipped (9 entries)

SEQ ID NO: 7410 - DNA, 21 bp, synthetic construct
  source 1..21: mol_type = other DNA
tttaggaaattgaagttggtg

SEQ ID NO: 7411-7419 - skipped (9 entries)

SEQ ID NO: 7420 - DNA, 21 bp, synthetic construct
  source 1..21: mol_type = other DNA
ggaaattgaagttggtggtgg

SEQ ID NO: 7421-7429 - skipped (9 entries)

SEQ ID NO: 7430 - DNA, 21 bp, synthetic construct
  source 1..21: mol_type = other DNA
ccttacagaggagaattctgc

SEQ ID NO: 7431-7439 - skipped (9 entries)

SEQ ID NO: 7440 - DNA, 21 bp, synthetic construct
  source 1..21: mol_type = other DNA
aactattcttttagccgtact

SEQ ID NO: 7441-7449 - skipped (9 entries)

SEQ ID NO: 7450 - DNA, 21 bp, synthetic construct
  source 1..21: mol_type = other DNA
gccgtactctgacagctgtgc

SEQ ID NO: 7451-7459 - skipped (9 entries)

SEQ ID NO: 7460 - DNA, 21 bp, synthetic construct
  source 1..21: mol_type = other DNA
ttttcttgtaggttgaaactt

SEQ ID NO: 7461-7469 - skipped (9 entries)

SEQ ID NO: 7470 - DNA, 21 bp, synthetic construct
  source 1..21: mol_type = other DNA
ttgtaggttgaaactttttct

SEQ ID NO: 7471-7479 - skipped (9 entries)

SEQ ID NO: 7480 - DNA, 21 bp, synthetic construct
  source 1..21: mol_type = other DNA
tgaaactactaaaatactcac

SEQ ID NO: 7481-7489 - skipped (9 entries)

SEQ ID NO: 7490 - DNA, 21 bp, synthetic construct
  source 1..21: mol_type = other DNA
cttcccagggcgtgatggtgg

SEQ ID NO: 7491-7499 - skipped (9 entries)

SEQ ID NO: 7500 - DNA, 21 bp, synthetic construct
  source 1..21: mol_type = other DNA
atttgtagtgatgatgatgat

SEQ ID NO: 7501-7509 - skipped (9 entries)

SEQ ID NO: 7510 - DNA, 21 bp, synthetic construct
  source 1..21: mol_type = other DNA
taattgcagtctatacgagat

SEQ ID NO: 7511-7519 - skipped (9 entries)

SEQ ID NO: 7520 - DNA, 21 bp, synthetic construct
  source 1..21: mol_type = other DNA
gaaattcatttctttttcagg

SEQ ID NO: 7521-7529 - skipped (9 entries)

SEQ ID NO: 7530 - DNA, 21 bp, synthetic construct
  source 1..21: mol_type = other DNA
tttttcagggacaagaatcct

SEQ ID NO: 7531-7539 - skipped (9 entries)

SEQ ID NO: 7540 - DNA, 21 bp, synthetic construct
  source 1..21: mol_type = other DNA
agggacaagaatccttcaaga

SEQ ID NO: 7541-7549 - skipped (9 entries)

SEQ ID NO: 7550 - DNA, 21 bp, synthetic construct
  source 1..21: mol_type = other DNA
tcttaatagggtggttctctt

SEQ ID NO: 7551-7559 - skipped (9 entries)

SEQ ID NO: 7560 - DNA, 21 bp, synthetic construct
  source 1..21: mol_type = other DNA
caggctattcaagatctctgg

SEQ ID NO: 7561-7569 - skipped (9 entries)

SEQ ID NO: 7570 - DNA, 21 bp, synthetic construct
  source 1..21: mol_type = other DNA
taaaatcatacttactcttca

SEQ ID NO: 7571-7579 - skipped (9 entries)

SEQ ID NO: 7580 - DNA, 21 bp, synthetic construct
  source 1..21: mol_type = other DNA
ctcactttttctatacttgct

SEQ ID NO: 7581-7589 - skipped (9 entries)

SEQ ID NO: 7590 - DNA, 21 bp, synthetic construct
  source 1..21: mol_type = other DNA
tttttcttggtacgctgcttc

SEQ ID NO: 7591-7599 - skipped (9 entries)

SEQ ID NO: 7600 - DNA, 21 bp, synthetic construct
  source 1..21: mol_type = other DNA
gggcccaggcggcgaggcact

SEQ ID NO: 7601-7609 - skipped (9 entries)

SEQ ID NO: 7610 - DNA, 21 bp, synthetic construct
  source 1..21: mol_type = other DNA
ggaggctaaggagaagcgcca

SEQ ID NO: 7611-7619 - skipped (9 entries)

SEQ ID NO: 7620 - DNA, 21 bp, synthetic construct
  source 1..21: mol_type = other DNA
tttaggaggctaaggagaagc

SEQ ID NO: 7621-7629 - skipped (9 entries)

SEQ ID NO: 7630 - DNA, 21 bp, synthetic construct
  source 1..21: mol_type = other DNA
ttttgtttaggaggctaagga

SEQ ID NO: 7631-7639 - skipped (9 entries)

SEQ ID NO: 7640 - DNA, 21 bp, synthetic construct
  source 1..21: mol_type = other DNA
ggtaagaaacctaggaccaaa

SEQ ID NO: 7641-7649 - skipped (9 entries)

SEQ ID NO: 7650 - DNA, 21 bp, synthetic construct
  source 1..21: mol_type = other DNA
aatttttaggtaagaaaccta

SEQ ID NO: 7651-7659 - skipped (9 entries)

SEQ ID NO: 7660 - DNA, 21 bp, synthetic construct
  source 1..21: mol_type = other DNA
ttctaaggagagaaggatatt

SEQ ID NO: 7661-7669 - skipped (9 entries)

SEQ ID NO: 7670 - DNA, 21 bp, synthetic construct
  source 1..21: mol_type = other DNA
cttaaaggaaccattaaagag

SEQ ID NO: 7671-7679 - skipped (9 entries)

SEQ ID NO: 7680 - DNA, 21 bp, synthetic construct
  source 1..21: mol_type = other DNA
tttacttaaaggaaccattaa

SEQ ID NO: 7681-7689 - skipped (9 entries)

SEQ ID NO: 7690 - DNA, 21 bp, synthetic construct
  source 1..21: mol_type = other DNA
ctcttctgcagttaaacacag

SEQ ID NO: 7691-7699 - skipped (9 entries)

SEQ ID NO: 7700 - DNA, 21 bp, synthetic construct
  source 1..21: mol_type = other DNA
ctgtttcctcttctgcagtta

SEQ ID NO: 7701-7709 - skipped (9 entries)

SEQ ID NO: 7710 - DNA, 21 bp, synthetic construct
  source 1..21: mol_type = other DNA
tagtctccaaaaaaagttggt

SEQ ID NO: 7711-7719 - skipped (9 entries)

SEQ ID NO: 7720 - DNA, 21 bp, synthetic construct
  source 1..21: mol_type = other DNA
tttctagtctccaaaaaaagt

SEQ ID NO: 7721-7729 - skipped (9 entries)

SEQ ID NO: 7730 - DNA, 21 bp, synthetic construct
  source 1..21: mol_type = other DNA
ccccagtatacctgaggtgca

SEQ ID NO: 7731-7739 - skipped (9 entries)

SEQ ID NO: 7740 - DNA, 21 bp, synthetic construct
  source 1..21: mol_type = other DNA
aacctgttacccacagaccct

SEQ ID NO: 7741-7749 - skipped (9 entries)

SEQ ID NO: 7750 - DNA, 21 bp, synthetic construct
  source 1..21: mol_type = other DNA
gcattgacacatgtcgcagca

SEQ ID NO: 7751-7759 - skipped (9 entries)

SEQ ID NO: 7760 - DNA, 21 bp, synthetic construct
  source 1..21: mol_type = other DNA
aggaattcaagtacttgtgga

SEQ ID NO: 7761-7769 - skipped (9 entries)

SEQ ID NO: 7770 - DNA, 21 bp, synthetic construct
  source 1..21: mol_type = other DNA
cagtagtgaactcccaggtgc

SEQ ID NO: 7771-7779 - skipped (9 entries)

SEQ ID NO: 7780 - DNA, 21 bp, synthetic construct
  source 1..21: mol_type = other DNA
atgttgttccacaagtacttg

SEQ ID NO: 7781-7789 - skipped (9 entries)

SEQ ID NO: 7790 - DNA, 21 bp, synthetic construct
  source 1..21: mol_type = other DNA
tacacacctgccaccttttga

SEQ ID NO: 7791-7799 - skipped (9 entries)

SEQ ID NO: 7800 - DNA, 21 bp, synthetic construct
  source 1..21: mol_type = other DNA
agaggtttctacacacctgcc

SEQ ID NO: 7801-7809 - skipped (9 entries)

SEQ ID NO: 7810 - DNA, 21 bp, synthetic construct
  source 1..21: mol_type = other DNA
atctgagtagcgtcggatgat

SEQ ID NO: 7811-7819 - skipped (9 entries)

SEQ ID NO: 7820 - DNA, 21 bp, synthetic construct
  source 1..21: mol_type = other DNA
tcaagagatttgaaggcacct

SEQ ID NO: 7821-7829 - skipped (9 entries)

SEQ ID NO: 7830 - DNA, 21 bp, synthetic construct
  source 1..21: mol_type = other DNA
tccagtgccatctttgtcaag

SEQ ID NO: 7831-7839 - skipped (9 entries)

SEQ ID NO: 7840 - DNA, 21 bp, synthetic construct
  source 1..21: mol_type = other DNA
cagggtggctttgtccactat

SEQ ID NO: 7841-7849 - skipped (9 entries)

SEQ ID NO: 7850 - DNA, 21 bp, synthetic construct
  source 1..21: mol_type = other DNA
tttattagcttacctttctgt

SEQ ID NO: 7851-7859 - skipped (9 entries)

SEQ ID NO: 7860 - DNA, 21 bp, synthetic construct
  source 1..21: mol_type = other DNA
ttagcttacctttctgttcct

SEQ ID NO: 7861-7869 - skipped (9 entries)

SEQ ID NO: 7870 - DNA, 21 bp, synthetic construct
  source 1..21: mol_type = other DNA
agtgaatcatctacagcctct

SEQ ID NO: 7871-7879 - skipped (9 entries)

SEQ ID NO: 7880 - DNA, 21 bp, synthetic construct
  source 1..21: mol_type = other DNA
tttttcagtgaatcatctaca

SEQ ID NO: 7881-7889 - skipped (9 entries)

SEQ ID NO: 7890 - DNA, 21 bp, synthetic construct
  source 1..21: mol_type = other DNA
cccttttttctttttcagtga

SEQ ID NO: 7891-7899 - skipped (9 entries)

SEQ ID NO: 7900 - DNA, 21 bp, synthetic construct
  source 1..21: mol_type = other DNA
aggtgtaatcctgagagattc

SEQ ID NO: 7901-7909 - skipped (9 entries)

SEQ ID NO: 7910 - DNA, 21 bp, synthetic construct
  source 1..21: mol_type = other DNA
tattccataacagtggttgaa

SEQ ID NO: 7911-7919 - skipped (9 entries)

SEQ ID NO: 7920 - DNA, 21 bp, synthetic construct
  source 1..21: mol_type = other DNA
tccacagctccgctagcaatc

SEQ ID NO: 7921-7929 - skipped (9 entries)

SEQ ID NO: 7930 - DNA, 21 bp, synthetic construct
  source 1..21: mol_type = other DNA
tgacccttcttctctttctag

SEQ ID NO: 7931-7939 - skipped (9 entries)

SEQ ID NO: 7940 - DNA, 21 bp, synthetic construct
  source 1..21: mol_type = other DNA
taggttgacaaggtcacaggc

SEQ ID NO: 7941-7949 - skipped (9 entries)

SEQ ID NO: 7950 - DNA, 21 bp, synthetic construct
  source 1..21: mol_type = other DNA
ttaagggtgagtcagatgatt

SEQ ID NO: 7951-7959 - skipped (9 entries)

SEQ ID NO: 7960 - DNA, 21 bp, synthetic construct
  source 1..21: mol_type = other DNA
ccctggttctaggaacttttg

SEQ ID NO: 7961-7969 - skipped (9 entries)

SEQ ID NO: 7970 - DNA, 21 bp, synthetic construct
  source 1..21: mol_type = other DNA
agacgatgccatcggccttgg

SEQ ID NO: 7971-7979 - skipped (9 entries)

SEQ ID NO: 7980 - DNA, 21 bp, synthetic construct
  source 1..21: mol_type = other DNA
attttctttccttaggcggta

SEQ ID NO: 7981-7989 - skipped (9 entries)

SEQ ID NO: 7990 - DNA, 21 bp, synthetic construct
  source 1..21: mol_type = other DNA
tttccttaggcggtaaccagc

SEQ ID NO: 7991-7999 - skipped (9 entries)

SEQ ID NO: 8000 - DNA, 21 bp, synthetic construct
  source 1..21: mol_type = other DNA
cttaggcggtaaccagcgtga

SEQ ID NO: 8001-8009 - skipped (9 entries)

SEQ ID NO: 8010 - DNA, 21 bp, synthetic construct
  source 1..21: mol_type = other DNA
tgctgccgcccgcaagcagag

SEQ ID NO: 8011-8019 - skipped (9 entries)

SEQ ID NO: 8020 - DNA, 21 bp, synthetic construct
  source 1..21: mol_type = other DNA
atattcttctggcgggcgagc

SEQ ID NO: 8021-8029 - skipped (9 entries)

SEQ ID NO: 8030 - DNA, 21 bp, synthetic construct
  source 1..21: mol_type = other DNA
ccttaaccgagtcgctctgct

SEQ ID NO: 8031-8039 - skipped (9 entries)

SEQ ID NO: 8040 - DNA, 21 bp, synthetic construct
  source 1..21: mol_type = other DNA
cctcccctccctggggctacc

SEQ ID NO: 8041-8049 - skipped (9 entries)

SEQ ID NO: 8050 - DNA, 21 bp, synthetic construct
  source 1..21: mol_type = other DNA
tttcccctcctgccttttagg

SEQ ID NO: 8051-8059 - skipped (9 entries)

SEQ ID NO: 8060 - DNA, 21 bp, synthetic construct
  source 1..21: mol_type = other DNA
ccctcctgccttttagggaag

SEQ ID NO: 8061-8069 - skipped (9 entries)

SEQ ID NO: 8070 - DNA, 21 bp, synthetic construct
  source 1..21: mol_type = other DNA
gggaagacaaaggcgctttgg

SEQ ID NO: 8071-8079 - skipped (9 entries)

SEQ ID NO: 8080 - DNA, 21 bp, synthetic construct
  source 1..21: mol_type = other DNA
tcttttcagatccgccgtcac

SEQ ID NO: 8081-8089 - skipped (9 entries)

SEQ ID NO: 8090 - DNA, 21 bp, synthetic construct
  source 1..21: mol_type = other DNA
agatccgccgtcactggggtg

SEQ ID NO: 8091-8099 - skipped (9 entries)

SEQ ID NO: 8100 - DNA, 21 bp, synthetic construct
  source 1..21: mol_type = other DNA
gggccaggctgtgtacttacg

SEQ ID NO: 8101-8109 - skipped (9 entries)

SEQ ID NO: 8110 - DNA, 21 bp, synthetic construct
  source 1..21: mol_type = other DNA
gtgtaaagctgcctcttacct

SEQ ID NO: 8111-8119 - skipped (9 entries)

SEQ ID NO: 8120 - DNA, 21 bp, synthetic construct
  source 1..21: mol_type = other DNA
taaattacctccaccatatgg

SEQ ID NO: 8121-8129 - skipped (9 entries)

SEQ ID NO: 8130 - DNA, 21 bp, synthetic construct
  source 1..21: mol_type = other DNA
cactcttcattggaccgtagt

SEQ ID NO: 8131-8139 - skipped (9 entries)

SEQ ID NO: 8140 - DNA, 21 bp, synthetic construct
  source 1..21: mol_type = other DNA
caaaatcattgtaatttccac

SEQ ID NO: 8141-8149 - skipped (9 entries)

SEQ ID NO: 8150 - DNA, 21 bp, synthetic construct
  source 1..21: mol_type = other DNA
ttacctcctccatagttgtca

SEQ ID NO: 8151-8159 - skipped (9 entries)

SEQ ID NO: 8160 - DNA, 21 bp, synthetic construct
  source 1..21: mol_type = other DNA
caccgccaccacgtgaatccc

SEQ ID NO: 8161-8169 - skipped (9 entries)

SEQ ID NO: 8170 - DNA, 21 bp, synthetic construct
  source 1..21: mol_type = other DNA
gtggtagcaggaacatggggg

SEQ ID NO: 8171-8179 - skipped (9 entries)

SEQ ID NO: 8180 - DNA, 21 bp, synthetic construct
  source 1..21: mol_type = other DNA
gaaattataaccagcaacctt

SEQ ID NO: 8181-8189 - skipped (9 entries)

SEQ ID NO: 8190 - DNA, 21 bp, synthetic construct
  source 1..21: mol_type = other DNA
ataggaaattatggaagtgga

SEQ ID NO: 8191-8199 - skipped (9 entries)

SEQ ID NO: 8200 - DNA, 21 bp, synthetic construct
  source 1..21: mol_type = other DNA
gaggtagccccggttatggag

SEQ ID NO: 8201-8209 - skipped (9 entries)

SEQ ID NO: 8210 - DNA, 21 bp, synthetic construct
  source 1..21: mol_type = other DNA
taataggtggcaattttggag

SEQ ID NO: 8211-8219 - skipped (9 entries)

SEQ ID NO: 8220 - DNA, 21 bp, synthetic construct
  source 1..21: mol_type = other DNA
gggatggctataatgggtatg

SEQ ID NO: 8221-8229 - skipped (9 entries)

SEQ ID NO: 8230 - DNA, 21 bp, synthetic construct
  source 1..21: mol_type = other DNA
gcccctaacagatggatatgg

SEQ ID NO: 8231-8239 - skipped (9 entries)

SEQ ID NO: 8240 - DNA, 21 bp, synthetic construct
  source 1..21: mol_type = other DNA
ggaccaggaccaggaagtaac

SEQ ID NO: 8241-8249 - skipped (9 entries)

SEQ ID NO: 8250 - DNA, 21 bp, synthetic construct
  source 1..21: mol_type = other DNA
gggattcacgtggtggcggtg

SEQ ID NO: 8251-8259 - skipped (9 entries)

SEQ ID NO: 8260 - DNA, 21 bp, synthetic construct
  source 1..21: mol_type = other DNA
gctttggggattcacgtggtg

SEQ ID NO: 8261-8269 - skipped (9 entries)

SEQ ID NO: 8270 - DNA, 21 bp, synthetic construct
  source 1..21: mol_type = other DNA
ttgtaggcaactttggctttg

SEQ ID NO: 8271-8279 - skipped (9 entries)

SEQ ID NO: 8280 - DNA, 21 bp, synthetic construct
  source 1..21: mol_type = other DNA
tctagacaagaaatgcaggaa

SEQ ID NO: 8281-8289 - skipped (9 entries)

SEQ ID NO: 8290 - DNA, 21 bp, synthetic construct
  source 1..21: mol_type = other DNA
tctaacagaaaaagcggatgg

SEQ ID NO: 8291-8299 - skipped (9 entries)

SEQ ID NO: 8300 - DNA, 21 bp, synthetic construct
  source 1..21: mol_type = other DNA
gcatagctcaccttgtcgtag

SEQ ID NO: 8301-8309 - skipped (9 entries)

SEQ ID NO: 8310 - DNA, 21 bp, synthetic construct
  source 1..21: mol_type = other DNA
agcaggaggcagttgcaggac

SEQ ID NO: 8311-8319 - skipped (9 entries)

SEQ ID NO: 8320 - DNA, 21 bp, synthetic construct
  source 1..21: mol_type = other DNA
tccttcccaagaattgaagag

SEQ ID NO: 8321-8329 - skipped (9 entries)

SEQ ID NO: 8330 - DNA, 21 bp, synthetic construct
  source 1..21: mol_type = other DNA
cctttctccttcccaagaatt

SEQ ID NO: 8331-8339 - skipped (9 entries)

SEQ ID NO: 8340 - DNA, 21 bp, synthetic construct
  source 1..21: mol_type = other DNA
tcctagatcaagactggtgcc

SEQ ID NO: 8341-8349 - skipped (9 entries)

SEQ ID NO: 8350 - DNA, 21 bp, synthetic construct
  source 1..21: mol_type = other DNA
ttttctcctagatcaagactg

SEQ ID NO: 8351-8359 - skipped (9 entries)

SEQ ID NO: 8360 - DNA, 21 bp, synthetic construct
  source 1..21: mol_type = other DNA
cttagtggtgtctatcgaaga

SEQ ID NO: 8361-8369 - skipped (9 entries)

SEQ ID NO: 8370 - DNA, 21 bp, synthetic construct
  source 1..21: mol_type = other DNA
ctatatgttgacagggtggtg

SEQ ID NO: 8371-8379 - skipped (9 entries)

SEQ ID NO: 8380 - DNA, 21 bp, synthetic construct
  source 1..21: mol_type = other DNA
aaggttggatggcaagcatgt

SEQ ID NO: 8381-8389 - skipped (9 entries)

SEQ ID NO: 8390 - DNA, 21 bp, synthetic construct
  source 1..21: mol_type = other DNA
cctgtgaggtggccgccggca

SEQ ID NO: 8391-8399 - skipped (9 entries)

SEQ ID NO: 8400 - DNA, 21 bp, synthetic construct
  source 1..21: mol_type = other DNA
accacctcagtgctcaagaac

SEQ ID NO: 8401-8409 - skipped (9 entries)

SEQ ID NO: 8410 - DNA, 21 bp, synthetic construct
  source 1..21: mol_type = other DNA
tgtccctcgggcagcaacatc

SEQ ID NO: 8411-8419 - skipped (9 entries)

SEQ ID NO: 8420 - DNA, 21 bp, synthetic construct
  source 1..21: mol_type = other DNA
ttgacaatgcgcccctcaggc

SEQ ID NO: 8421-8429 - skipped (9 entries)

SEQ ID NO: 8430 - DNA, 21 bp, synthetic construct
  source 1..21: mol_type = other DNA
tagccgagtcgtccggaaatc

SEQ ID NO: 8431-8439 - skipped (9 entries)

SEQ ID NO: 8440 - DNA, 21 bp, synthetic construct
  source 1..21: mol_type = other DNA
ttctgtgggttgatctgtatt

SEQ ID NO: 8441-8449 - skipped (9 entries)

SEQ ID NO: 8450 - DNA, 21 bp, synthetic construct
  source 1..21: mol_type = other DNA
ccagcaccatcctgcaccttg

SEQ ID NO: 8451-8459 - skipped (9 entries)

SEQ ID NO: 8460 - DNA, 21 bp, synthetic construct
  source 1..21: mol_type = other DNA
tctttgccagcaccatcctgc

SEQ ID NO: 8461-8469 - skipped (9 entries)

SEQ ID NO: 8470 - DNA, 21 bp, synthetic construct
  source 1..21: mol_type = other DNA
ctgattttctctttgccagca

SEQ ID NO: 8471-8479 - skipped (9 entries)

SEQ ID NO: 8480 - DNA, 21 bp, synthetic construct
  source 1..21: mol_type = other DNA
caaggcatctccccagagcga

SEQ ID NO: 8481-8489 - skipped (9 entries)

SEQ ID NO: 8490 - DNA, 21 bp, synthetic construct
  source 1..21: mol_type = other DNA
cctgagaatacagatcaaccc

SEQ ID NO: 8491-8499 - skipped (9 entries)

SEQ ID NO: 8500 - DNA, 21 bp, synthetic construct
  source 1..21: mol_type = other DNA
cttcttgtgcagtttgcctga

SEQ ID NO: 8501-8509 - skipped (9 entries)

SEQ ID NO: 8510 - DNA, 21 bp, synthetic construct
  source 1..21: mol_type = other DNA
tgttttgcttcttgtgcagtt

SEQ ID NO: 8511-8519 - skipped (9 entries)

SEQ ID NO: 8520 - DNA, 21 bp, synthetic construct
  source 1..21: mol_type = other DNA
tctcgggcttcatctcttgtg

SEQ ID NO: 8521-8529 - skipped (9 entries)

SEQ ID NO: 8530 - DNA, 21 bp, synthetic construct
  source 1..21: mol_type = other DNA
gcggttcttagaagagtactt

SEQ ID NO: 8531-8539 - skipped (9 entries)

SEQ ID NO: 8540 - DNA, 21 bp, synthetic construct
  source 1..21: mol_type = other DNA
tgaagaccctcactggcaaaa

SEQ ID NO: 8541-8549 - skipped (9 entries)

SEQ ID NO: 8550 - DNA, 21 bp, synthetic construct
  source 1..21: mol_type = other DNA
ccagtgagggtcttcacaaag

SEQ ID NO: 8551-8559 - skipped (9 entries)

SEQ ID NO: 8560 - DNA, 21 bp, synthetic construct
  source 1..21: mol_type = other DNA
tgggcaagctggcggagagaa

SEQ ID NO: 8561-8569 - skipped (9 entries)

SEQ ID NO: 8570 - DNA, 21 bp, synthetic construct
  source 1..21: mol_type = other DNA
accttcttcttgggacgcagg

SEQ ID NO: 8571-8579 - skipped (9 entries)

SEQ ID NO: 8580 - DNA, 21 bp, synthetic construct
  source 1..21: mol_type = other DNA
taggtgaaaaggtttactttt

SEQ ID NO: 8581-8589 - skipped (9 entries)

SEQ ID NO: 8590 - DNA, 21 bp, synthetic construct
  source 1..21: mol_type = other DNA
tgatttaaaaagcatacctgg

SEQ ID NO: 8591-8599 - skipped (9 entries)

SEQ ID NO: 8600 - DNA, 21 bp, synthetic construct
  source 1..21: mol_type = other DNA
aaaagcatacctggatcaatg

SEQ ID NO: 8601-8609 - skipped (9 entries)

SEQ ID NO: 8610 - DNA, 21 bp, synthetic construct
  source 1..21: mol_type = other DNA
ggtgactctgacatcattaga

SEQ ID NO: 8611-8619 - skipped (9 entries)

SEQ ID NO: 8620 - DNA, 21 bp, synthetic construct
  source 1..21: mol_type = other DNA
ttttttaggtgactctgacat

SEQ ID NO: 8621-8629 - skipped (9 entries)

SEQ ID NO: 8630 - DNA, 21 bp, synthetic construct
  source 1..21: mol_type = other DNA
tttttattttttaggtgactc

SEQ ID NO: 8631-8639 - skipped (9 entries)

SEQ ID NO: 8640 - DNA, 21 bp, synthetic construct
  source 1..21: mol_type = other DNA
gttcccaaaggaaatctgaaa

SEQ ID NO: 8641-8649 - skipped (9 entries)

SEQ ID NO: 8650 - DNA, 21 bp, synthetic construct
  source 1..21: mol_type = other DNA
cccattttggttcccaaagga

SEQ ID NO: 8651-8659 - skipped (9 entries)

SEQ ID NO: 8660 - DNA, 21 bp, synthetic construct
  source 1..21: mol_type = other DNA
tagaaaaagtcgctggagtcg

SEQ ID NO: 8661-8669 - skipped (9 entries)

SEQ ID NO: 8670 - DNA, 21 bp, synthetic construct
  source 1..21: mol_type = other DNA
ctttgtagaaaaagtcgctgg

SEQ ID NO: 8671-8679 - skipped (9 entries)

SEQ ID NO: 8680 - DNA, 21 bp, synthetic construct
  source 1..21: mol_type = other DNA
atgtttgctttgtagaaaaag

SEQ ID NO: 8681-8689 - skipped (9 entries)

SEQ ID NO: 8690 - DNA, 21 bp, synthetic construct
  source 1..21: mol_type = other DNA
cgcctgccgcccccggatggg

SEQ ID NO: 8691-8699 - skipped (9 entries)

SEQ ID NO: 8700 - DNA, 21 bp, synthetic construct
  source 1..21: mol_type = other DNA
tcccaccgctttccgagcccg

SEQ ID NO: 8701-8709 - skipped (9 entries)

SEQ ID NO: 8710 - DNA, 21 bp, synthetic construct
  source 1..21: mol_type = other DNA
cgagcccgcttgcacctcggc

SEQ ID NO: 8711-8719 - skipped (9 entries)

SEQ ID NO: 8720 - DNA, 21 bp, synthetic construct
  source 1..21: mol_type = other DNA
tggcgtcgctcctgtgctgtg

SEQ ID NO: 8721-8729 - skipped (9 entries)

SEQ ID NO: 8730 - DNA, 21 bp, synthetic construct
  source 1..21: mol_type = other DNA
tgttgcagcctcggaaaattg

SEQ ID NO: 8731-8739 - skipped (9 entries)

SEQ ID NO: 8740 - DNA, 21 bp, synthetic construct
  source 1..21: mol_type = other DNA
tctctttccctctaggtttgg

SEQ ID NO: 8741-8749 - skipped (9 entries)

SEQ ID NO: 8750 - DNA, 21 bp, synthetic construct
  source 1..21: mol_type = other DNA
cctctaggtttggcagtgaag

SEQ ID NO: 8751-8759 - skipped (9 entries)

SEQ ID NO: 8760 - DNA, 21 bp, synthetic construct
  source 1..21: mol_type = other DNA
gtcgggctgtgagcaggaagt

SEQ ID NO: 8761-8769 - skipped (9 entries)

SEQ ID NO: 8770 - DNA, 21 bp, synthetic construct
  source 1..21: mol_type = other DNA
ttctttctattgtcttccagg

SEQ ID NO: 8771-8779 - skipped (9 entries)

SEQ ID NO: 8780 - DNA, 21 bp, synthetic construct
  source 1..21: mol_type = other DNA
tattgtcttccaggcaccatt

SEQ ID NO: 8781-8789 - skipped (9 entries)

SEQ ID NO: 8790 - DNA, 21 bp, synthetic construct
  source 1..21: mol_type = other DNA
gctaaagttctttcagtcatc

SEQ ID NO: 8791-8799 - skipped (9 entries)

SEQ ID NO: 8800 - DNA, 21 bp, synthetic construct
  source 1..21: mol_type = other DNA
cccatcagcaggactagcgct

SEQ ID NO: 8801-8809 - skipped (9 entries)

SEQ ID NO: 8810 - DNA, 21 bp, synthetic construct
  source 1..21: mol_type = other DNA
ctcctcctccagcgctagtcc

SEQ ID NO: 8811-8819 - skipped (9 entries)

SEQ ID NO: 8820 - DNA, 21 bp, synthetic construct
  source 1..21: mol_type = other DNA
tctttcctcctcctccagcgc

SEQ ID NO: 8821-8829 - skipped (9 entries)

SEQ ID NO: 8830 - DNA, 21 bp, synthetic construct
  source 1..21: mol_type = other DNA
gcatggatcttcgtaccaaga

SEQ ID NO: 8831-8839 - skipped (9 entries)

SEQ ID NO: 8840 - DNA, 21 bp, synthetic construct
  source 1..21: mol_type = other DNA
tcctcataatctgtagactga

SEQ ID NO: 8841-8849 - skipped (9 entries)

SEQ ID NO: 8850 - DNA, 21 bp, synthetic construct
  source 1..21: mol_type = other DNA
tctttcctatcctttcaggct

SEQ ID NO: 8851-8859 - skipped (9 entries)

SEQ ID NO: 8860 - DNA, 21 bp, synthetic construct
  source 1..21: mol_type = other DNA
ctatcctttcaggctattgag

SEQ ID NO: 8861-8869 - skipped (9 entries)

SEQ ID NO: 8870 - DNA, 21 bp, synthetic construct
  source 1..21: mol_type = other DNA
aggctattgagggcacctaca

SEQ ID NO: 8871-8879 - skipped (9 entries)

SEQ ID NO: 8880 - DNA, 21 bp, synthetic construct
  source 1..21: mol_type = other DNA
ttctgaggttccccgcacctc

SEQ ID NO: 8881-8889 - skipped (9 entries)

SEQ ID NO: 8890 - DNA, 23 bp, synthetic construct
  source 1..23: mol_type = other DNA
cccagctctcataccatgagtcc

SEQ ID NO: 8891-8899 - skipped (9 entries)

SEQ ID NO: 8900 - DNA, 23 bp, synthetic construct
  source 1..23: mol_type = other DNA
tatccacagtgaatcttggttgt

SEQ ID NO: 8901-8909 - skipped (9 entries)

SEQ ID NO: 8910 - DNA, 23 bp, synthetic construct
  source 1..23: mol_type = other DNA
cacttcgtgcccgaaacgccgaa

SEQ ID NO: 8911-8919 - skipped (9 entries)

SEQ ID NO: 8920 - DNA, 23 bp, synthetic construct
  source 1..23: mol_type = other DNA
tctctgaccattgtagcggtttg

SEQ ID NO: 8921-8929 - skipped (9 entries)

SEQ ID NO: 8930 - DNA, 23 bp, synthetic construct
  source 1..23: mol_type = other DNA
tagcggtttgctgcggtaatcat

SEQ ID NO: 8931-8939 - skipped (9 entries)

SEQ ID NO: 8940 - DNA, 23 bp, synthetic construct
  source 1..23: mol_type = other DNA
tcagttctgggaaaatggtgtgc

SEQ ID NO: 8941-8949 - skipped (9 entries)

SEQ ID NO: 8950 - DNA, 23 bp, synthetic construct
  source 1..23: mol_type = other DNA
agaatatggtggggagctgtgat

SEQ ID NO: 8951-8959 - skipped (9 entries)

SEQ ID NO: 8960 - DNA, 23 bp, synthetic construct
  source 1..23: mol_type = other DNA
tccttctagttatgagccagagt

SEQ ID NO: 8961-8969 - skipped (9 entries)

SEQ ID NO: 8970 - DNA, 23 bp, synthetic construct
  source 1..23: mol_type = other DNA
cctggtttaatctacagaatgat

SEQ ID NO: 8971-8979 - skipped (9 entries)

SEQ ID NO: 8980 - DNA, 23 bp, synthetic construct
  source 1..23: mol_type = other DNA
ttctccttatttttgtttctgga

SEQ ID NO: 8981-8989 - skipped (9 entries)

SEQ ID NO: 8990 - DNA, 23 bp, synthetic construct
  source 1..23: mol_type = other DNA
ttgtttctggaaaagttgtatta

SEQ ID NO: 8991-8999 - skipped (9 entries)

SEQ ID NO: 9000 - DNA, 23 bp, synthetic construct
  source 1..23: mol_type = other DNA
atgaagcatttgaaaacatctac

SEQ ID NO: 9001-9009 - skipped (9 entries)

SEQ ID NO: 9010 - DNA, 23 bp, synthetic construct
  source 1..23: mol_type = other DNA
taaagggattcaggaagacgacg

SEQ ID NO: 9011-9019 - skipped (9 entries)

SEQ ID NO: 9020 - DNA, 23 bp, synthetic construct
  source 1..23: mol_type = other DNA
ggcgtttcgggcacgaagtgcaa

SEQ ID NO: 9021-9029 - skipped (9 entries)

SEQ ID NO: 9030 - DNA, 23 bp, synthetic construct
  source 1..23: mol_type = other DNA
tattcggcgtttcgggcacgaag

SEQ ID NO: 9031-9039 - skipped (9 entries)

SEQ ID NO: 9040 - DNA, 23 bp, synthetic construct
  source 1..23: mol_type = other DNA
aaatagatctaaccttgggatta

SEQ ID NO: 9041-9049 - skipped (9 entries)

SEQ ID NO: 9050 - DNA, 23 bp, synthetic construct
  source 1..23: mol_type = other DNA
tcccagaactgaaaatcagtgcc

SEQ ID NO: 9051-9059 - skipped (9 entries)

SEQ ID NO: 9060 - DNA, 23 bp, synthetic construct
  source 1..23: mol_type = other DNA
cttacggctacctcttggctcct

SEQ ID NO: 9061-9069 - skipped (9 entries)

SEQ ID NO: 9070 - DNA, 23 bp, synthetic construct
  source 1..23: mol_type = other DNA
tcttgctgccagtctggactgtt

SEQ ID NO: 9071-9079 - skipped (9 entries)

SEQ ID NO: 9080 - DNA, 23 bp, synthetic construct
  source 1..23: mol_type = other DNA
tgaatcttgaagtccaagaactt

SEQ ID NO: 9081-9089 - skipped (9 entries)

SEQ ID NO: 9090 - DNA, 23 bp, synthetic construct
  source 1..23: mol_type = other DNA
ttggtgggtgagcacaaggcctt

SEQ ID NO: 9091-9099 - skipped (9 entries)

SEQ ID NO: 9100 - DNA, 23 bp, synthetic construct
  source 1..23: mol_type = other DNA
cagacttacctactaaattgttg

SEQ ID NO: 9101-9109 - skipped (9 entries)

SEQ ID NO: 9110 - DNA, 23 bp, synthetic construct
  source 1..23: mol_type = other DNA
aaccaggaaataactctggctca

SEQ ID NO: 9111-9119 - skipped (9 entries)

SEQ ID NO: 9120 - DNA, 23 bp, synthetic construct
  source 1..23: mol_type = other DNA
tgtagattaaaccaggaaataac

SEQ ID NO: 9121-9129 - skipped (9 entries)

SEQ ID NO: 9130 - DNA, 23 bp, synthetic construct
  source 1..23: mol_type = other DNA
tgggtttgatcattctgtagatt

SEQ ID NO: 9131-9139 - skipped (9 entries)

SEQ ID NO: 9140 - DNA, 23 bp, synthetic construct
  source 1..23: mol_type = other DNA
ctgctctgactttagcacctaag

SEQ ID NO: 9141-9149 - skipped (9 entries)

SEQ ID NO: 9150 - DNA, 23 bp, synthetic construct
  source 1..23: mol_type = other DNA
cgtcgtcttcctgaatcccttta

SEQ ID NO: 9151-9159 - skipped (9 entries)

SEQ ID NO: 9160 - DNA, 23 bp, synthetic construct
  source 1..23: mol_type = other DNA
tagtgagtggcggccctgggact

SEQ ID NO: 9161-9169 - skipped (9 entries)

SEQ ID NO: 9170 - DNA, 23 bp, synthetic construct
  source 1..23: mol_type = other DNA
ccagagtgcatgagctcggagct

SEQ ID NO: 9171-9179 - skipped (9 entries)

SEQ ID NO: 9180 - DNA, 23 bp, synthetic construct
  source 1..23: mol_type = other DNA
tatctacaacctggacgagagtg

SEQ ID NO: 9181-9189 - skipped (9 entries)

SEQ ID NO: 9190 - DNA, 23 bp, synthetic construct
  source 1..23: mol_type = other DNA
cctggacttctgcactgccaggg

SEQ ID NO: 9191-9199 - skipped (9 entries)

SEQ ID NO: 9200 - DNA, 23 bp, synthetic construct
  source 1..23: mol_type = other DNA
ctgacagctctttggggagttcc

SEQ ID NO: 9201-9209 - skipped (9 entries)

SEQ ID NO: 9210 - DNA, 23 bp, synthetic construct
  source 1..23: mol_type = other DNA
agctggagaagcccaagcccatc

SEQ ID NO: 9211-9219 - skipped (9 entries)

SEQ ID NO: 9220 - DNA, 23 bp, synthetic construct
  source 1..23: mol_type = other DNA
tcaccccactgctgcaccagatt

SEQ ID NO: 9221-9229 - skipped (9 entries)

SEQ ID NO: 9230 - DNA, 23 bp, synthetic construct
  source 1..23: mol_type = other DNA
atgaagataaattgatagcacaa

SEQ ID NO: 9231-9239 - skipped (9 entries)

SEQ ID NO: 9240 - DNA, 23 bp, synthetic construct
  source 1..23: mol_type = other DNA
atagcacaaaatctagaacttaa

SEQ ID NO: 9241-9249 - skipped (9 entries)

SEQ ID NO: 9250 - DNA, 23 bp, synthetic construct
  source 1..23: mol_type = other DNA
gtttgactaagcttaattgcttt

SEQ ID NO: 9251-9259 - skipped (9 entries)

SEQ ID NO: 9260 - DNA, 23 bp, synthetic construct
  source 1..23: mol_type = other DNA
ctttctggaacaggatctgaaac

SEQ ID NO: 9261-9269 - skipped (9 entries)

SEQ ID NO: 9270 - DNA, 23 bp, synthetic construct
  source 1..23: mol_type = other DNA
atacccatcaacactggtaagaa

SEQ ID NO: 9271-9279 - skipped (9 entries)

SEQ ID NO: 9280 - DNA, 23 bp, synthetic construct
  source 1..23: mol_type = other DNA
ttcatcaattggcggggttccat

SEQ ID NO: 9281-9289 - skipped (9 entries)

SEQ ID NO: 9290 - DNA, 23 bp, synthetic construct
  source 1..23: mol_type = other DNA
gcggggttccatttttccaggta

SEQ ID NO: 9291-9299 - skipped (9 entries)

SEQ ID NO: 9300 - DNA, 23 bp, synthetic construct
  source 1..23: mol_type = other DNA
tcccgccttaaatccacagcata

SEQ ID NO: 9301-9309 - skipped (9 entries)

SEQ ID NO: 9310 - DNA, 23 bp, synthetic construct
  source 1..23: mol_type = other DNA
acacactggagaggtctaaagtg

SEQ ID NO: 9311-9319 - skipped (9 entries)

SEQ ID NO: 9320 - DNA, 23 bp, synthetic construct
  source 1..23: mol_type = other DNA
cctctgcgagcccagatcaacct

SEQ ID NO: 9321-9329 - skipped (9 entries)

SEQ ID NO: 9330 - DNA, 23 bp, synthetic construct
  source 1..23: mol_type = other DNA
agttctagattttgtgctatcaa

SEQ ID NO: 9331-9339 - skipped (9 entries)

SEQ ID NO: 9340 - DNA, 23 bp, synthetic construct
  source 1..23: mol_type = other DNA
ttatggtttcattaagttctaga

SEQ ID NO: 9341-9349 - skipped (9 entries)

SEQ ID NO: 9350 - DNA, 23 bp, synthetic construct
  source 1..23: mol_type = other DNA
agcttagtcaaaccaatttttat

SEQ ID NO: 9351-9359 - skipped (9 entries)

SEQ ID NO: 9360 - DNA, 23 bp, synthetic construct
  source 1..23: mol_type = other DNA
ctcttttaaagtacctgttggga

SEQ ID NO: 9361-9369 - skipped (9 entries)

SEQ ID NO: 9370 - DNA, 23 bp, synthetic construct
  source 1..23: mol_type = other DNA
tatttctcttttaaagtacctgt

SEQ ID NO: 9371-9379 - skipped (9 entries)

SEQ ID NO: 9380 - DNA, 23 bp, synthetic construct
  source 1..23: mol_type = other DNA
acagctcaggctgtttccttttc

SEQ ID NO: 9381-9389 - skipped (9 entries)

SEQ ID NO: 9390 - DNA, 23 bp, synthetic construct
  source 1..23: mol_type = other DNA
tctcttctttgttgttttctgaa

SEQ ID NO: 9391-9399 - skipped (9 entries)

SEQ ID NO: 9400 - DNA, 23 bp, synthetic construct
  source 1..23: mol_type = other DNA
accggaattgtctcttctttgtt

SEQ ID NO: 9401-9409 - skipped (9 entries)

SEQ ID NO: 9410 - DNA, 23 bp, synthetic construct
  source 1..23: mol_type = other DNA
atgaacaatccacaccagcatct

SEQ ID NO: 9411-9419 - skipped (9 entries)

SEQ ID NO: 9420 - DNA, 23 bp, synthetic construct
  source 1..23: mol_type = other DNA
aaggttgatctgggctcgcagag

SEQ ID NO: 9421-9429 - skipped (9 entries)

SEQ ID NO: 9430 - DNA, 23 bp, synthetic construct
  source 1..23: mol_type = other DNA
ccaacccccaagtgaattaaagg

SEQ ID NO: 9431-9439 - skipped (9 entries)

SEQ ID NO: 9440 - DNA, 21 bp, synthetic construct
  source 1..21: mol_type = other DNA
tcttctaggtatgacaacgaa

SEQ ID NO: 9441-9449 - skipped (9 entries)

SEQ ID NO: 9450 - DNA, 21 bp, synthetic construct
  source 1..21: mol_type = other DNA
ccagctctcataccatgagtc

SEQ ID NO: 9451-9459 - skipped (9 entries)

SEQ ID NO: 9460 - DNA, 21 bp, synthetic construct
  source 1..21: mol_type = other DNA
tgcccgaaacgccgaatataa

SEQ ID NO: 9461-9469 - skipped (9 entries)

SEQ ID NO: 9470 - DNA, 21 bp, synthetic construct
  source 1..21: mol_type = other DNA
ctctgaccattgtagcggttt

SEQ ID NO: 9471-9479 - skipped (9 entries)

SEQ ID NO: 9480 - DNA, 21 bp, synthetic construct
  source 1..21: mol_type = other DNA
gttctgggaaaatggtgtgca

SEQ ID NO: 9481-9489 - skipped (9 entries)

SEQ ID NO: 9490 - DNA, 21 bp, synthetic construct
  source 1..21: mol_type = other DNA
gggaaaatggtgtgcacagga

SEQ ID NO: 9491-9499 - skipped (9 entries)

SEQ ID NO: 9500 - DNA, 21 bp, synthetic construct
  source 1..21: mol_type = other DNA
tttccctagtgaagaacagtc

SEQ ID NO: 9501-9509 - skipped (9 entries)

SEQ ID NO: 9510 - DNA, 21 bp, synthetic construct
  source 1..21: mol_type = other DNA
ctagtgaagaacagtccagac

SEQ ID NO: 9511-9519 - skipped (9 entries)

SEQ ID NO: 9520 - DNA, 21 bp, synthetic construct
  source 1..21: mol_type = other DNA
agctaagttcttggacttcaa

SEQ ID NO: 9521-9529 - skipped (9 entries)

SEQ ID NO: 9530 - DNA, 21 bp, synthetic construct
  source 1..21: mol_type = other DNA
tggacttcaagattcagaata

SEQ ID NO: 9531-9539 - skipped (9 entries)

SEQ ID NO: 9540 - DNA, 21 bp, synthetic construct
  source 1..21: mol_type = other DNA
agattcagaatatggtgggga

SEQ ID NO: 9541-9549 - skipped (9 entries)

SEQ ID NO: 9550 - DNA, 21 bp, synthetic construct
  source 1..21: mol_type = other DNA
gaatatggtggggagctgtga

SEQ ID NO: 9551-9559 - skipped (9 entries)

SEQ ID NO: 9560 - DNA, 21 bp, synthetic construct
  source 1..21: mol_type = other DNA
tataaggttagaaggccttgt

SEQ ID NO: 9561-9569 - skipped (9 entries)

SEQ ID NO: 9570 - DNA, 21 bp, synthetic construct
  source 1..21: mol_type = other DNA
ttctagttatgagccagagtt

SEQ ID NO: 9571-9579 - skipped (9 entries)

SEQ ID NO: 9580 - DNA, 21 bp, synthetic construct
  source 1..21: mol_type = other DNA
agttatgagccagagttattt

SEQ ID NO: 9581-9589 - skipped (9 entries)

SEQ ID NO: 9590 - DNA, 21 bp, synthetic construct
  source 1..21: mol_type = other DNA
tggtttaatctacagaatgat

SEQ ID NO: 9591-9599 - skipped (9 entries)

SEQ ID NO: 9600 - DNA, 21 bp, synthetic construct
  source 1..21: mol_type = other DNA
ccttatttttgtttctggaaa

SEQ ID NO: 9601-9609 - skipped (9 entries)

SEQ ID NO: 9610 - DNA, 21 bp, synthetic construct
  source 1..21: mol_type = other DNA
ggaaaagttgtattaacaggt

SEQ ID NO: 9611-9619 - skipped (9 entries)

SEQ ID NO: 9620 - DNA, 21 bp, synthetic construct
  source 1..21: mol_type = other DNA
taggtgctaaagtcagagcag

SEQ ID NO: 9621-9629 - skipped (9 entries)

SEQ ID NO: 9630 - DNA, 21 bp, synthetic construct
  source 1..21: mol_type = other DNA
aaagggattcaggaagacgac

SEQ ID NO: 9631-9639 - skipped (9 entries)

SEQ ID NO: 9640 - DNA, 21 bp, synthetic construct
  source 1..21: mol_type = other DNA
ggcacgaagtgcaatggtctt

SEQ ID NO: 9641-9649 - skipped (9 entries)

SEQ ID NO: 9650 - DNA, 21 bp, synthetic construct
  source 1..21: mol_type = other DNA
gcgtttcgggcacgaagtgca

SEQ ID NO: 9651-9659 - skipped (9 entries)

SEQ ID NO: 9660 - DNA, 21 bp, synthetic construct
  source 1..21: mol_type = other DNA
tggctctcttatcctcatgat

SEQ ID NO: 9661-9669 - skipped (9 entries)

SEQ ID NO: 9670 - DNA, 21 bp, synthetic construct
  source 1..21: mol_type = other DNA
cagaactgaaaatcagtgccg

SEQ ID NO: 9671-9679 - skipped (9 entries)

SEQ ID NO: 9680 - DNA, 21 bp, synthetic construct
  source 1..21: mol_type = other DNA
tacggctacctcttggctcct

SEQ ID NO: 9681-9689 - skipped (9 entries)

SEQ ID NO: 9690 - DNA, 21 bp, synthetic construct
  source 1..21: mol_type = other DNA
tgctgccagtctggactgttc

SEQ ID NO: 9691-9699 - skipped (9 entries)

SEQ ID NO: 9700 - DNA, 21 bp, synthetic construct
  source 1..21: mol_type = other DNA
gtacaactctagcatattttc

SEQ ID NO: 9701-9709 - skipped (9 entries)

SEQ ID NO: 9710 - DNA, 21 bp, synthetic construct
  source 1..21: mol_type = other DNA
gaatcttgaagtccaagaact

SEQ ID NO: 9711-9719 - skipped (9 entries)

SEQ ID NO: 9720 - DNA, 21 bp, synthetic construct
  source 1..21: mol_type = other DNA
catcacagctccccaccatat

SEQ ID NO: 9721-9729 - skipped (9 entries)

SEQ ID NO: 9730 - DNA, 21 bp, synthetic construct
  source 1..21: mol_type = other DNA
aaccttataggaaacttcaca

SEQ ID NO: 9731-9739 - skipped (9 entries)

SEQ ID NO: 9740 - DNA, 21 bp, synthetic construct
  source 1..21: mol_type = other DNA
gacttacctactaaattgttg

SEQ ID NO: 9741-9749 - skipped (9 entries)

SEQ ID NO: 9750 - DNA, 21 bp, synthetic construct
  source 1..21: mol_type = other DNA
gtagattaaaccaggaaataa

SEQ ID NO: 9751-9759 - skipped (9 entries)

SEQ ID NO: 9760 - DNA, 21 bp, synthetic construct
  source 1..21: mol_type = other DNA
gggtttgatcattctgtagat

SEQ ID NO: 9761-9769 - skipped (9 entries)

SEQ ID NO: 9770 - DNA, 21 bp, synthetic construct
  source 1..21: mol_type = other DNA
agaaacaaaaataaggagaac

SEQ ID NO: 9771-9779 - skipped (9 entries)

SEQ ID NO: 9780 - DNA, 21 bp, synthetic construct
  source 1..21: mol_type = other DNA
tgttacaacttacctgttaat

SEQ ID NO: 9781-9789 - skipped (9 entries)

SEQ ID NO: 9790 - DNA, 21 bp, synthetic construct
  source 1..21: mol_type = other DNA
gctctgactttagcacctaag

SEQ ID NO: 9791-9799 - skipped (9 entries)

SEQ ID NO: 9800 - DNA, 21 bp, synthetic construct
  source 1..21: mol_type = other DNA
taaatttctgctctgacttta

SEQ ID NO: 9801-9809 - skipped (9 entries)

SEQ ID NO: 9810 - DNA, 21 bp, synthetic construct
  source 1..21: mol_type = other DNA
aatgcttcataaatttctgct

SEQ ID NO: 9811-9819 - skipped (9 entries)

SEQ ID NO: 9820 - DNA, 21 bp, synthetic construct
  source 1..21: mol_type = other DNA
tgaatccctttagaatagggt

SEQ ID NO: 9821-9829 - skipped (9 entries)

SEQ ID NO: 9830 - DNA, 21 bp, synthetic construct
  source 1..21: mol_type = other DNA
ctcccactgggcccaacaaca

SEQ ID NO: 9831-9839 - skipped (9 entries)

SEQ ID NO: 9840 - DNA, 21 bp, synthetic construct
  source 1..21: mol_type = other DNA
gccctgctggacagcagcagc

SEQ ID NO: 9841-9849 - skipped (9 entries)

SEQ ID NO: 9850 - DNA, 21 bp, synthetic construct
  source 1..21: mol_type = other DNA
tccggacccaacccttctacc

SEQ ID NO: 9851-9859 - skipped (9 entries)

SEQ ID NO: 9860 - DNA, 21 bp, synthetic construct
  source 1..21: mol_type = other DNA
acctcctttgagcccatcaag

SEQ ID NO: 9861-9869 - skipped (9 entries)

SEQ ID NO: 9870 - DNA, 21 bp, synthetic construct
  source 1..21: mol_type = other DNA
tgtttttcagttttggaactc

SEQ ID NO: 9871-9879 - skipped (9 entries)

SEQ ID NO: 9880 - DNA, 21 bp, synthetic construct
  source 1..21: mol_type = other DNA
gttttggaactccccaaagag

SEQ ID NO: 9881-9889 - skipped (9 entries)

SEQ ID NO: 9890 - DNA, 21 bp, synthetic construct
  source 1..21: mol_type = other DNA
cagagtgcatgagctcggagc

SEQ ID NO: 9891-9899 - skipped (9 entries)

SEQ ID NO: 9900 - DNA, 21 bp, synthetic construct
  source 1..21: mol_type = other DNA
tctttctccacccccgggaga

SEQ ID NO: 9901-9909 - skipped (9 entries)

SEQ ID NO: 9910 - DNA, 21 bp, synthetic construct
  source 1..21: mol_type = other DNA
ccacccccgggagaccacgat

SEQ ID NO: 9911-9919 - skipped (9 entries)

SEQ ID NO: 9920 - DNA, 21 bp, synthetic construct
  source 1..21: mol_type = other DNA
gcactgccagggacagcagtg

SEQ ID NO: 9921-9929 - skipped (9 entries)

SEQ ID NO: 9930 - DNA, 21 bp, synthetic construct
  source 1..21: mol_type = other DNA
ctggacttctgcactgccagg

SEQ ID NO: 9931-9939 - skipped (9 entries)

SEQ ID NO: 9940 - DNA, 21 bp, synthetic construct
  source 1..21: mol_type = other DNA
gacagctctttggggagttcc

SEQ ID NO: 9941-9949 - skipped (9 entries)

SEQ ID NO: 9950 - DNA, 21 bp, synthetic construct
  source 1..21: mol_type = other DNA
gaggacatcaactcctccagc

SEQ ID NO: 9951-9959 - skipped (9 entries)

SEQ ID NO: 9960 - DNA, 21 bp, synthetic construct
  source 1..21: mol_type = other DNA
agggccacccaccttctgagg

SEQ ID NO: 9961-9969 - skipped (9 entries)

SEQ ID NO: 9970 - DNA, 21 bp, synthetic construct
  source 1..21: mol_type = other DNA
ctctcgtccaggttgtagata

SEQ ID NO: 9971-9979 - skipped (9 entries)

SEQ ID NO: 9980 - DNA, 21 bp, synthetic construct
  source 1..21: mol_type = other DNA
cccacttgtaggtgccctcat

SEQ ID NO: 9981-9989 - skipped (9 entries)

SEQ ID NO: 9990 - DNA, 21 bp, synthetic construct
  source 1..21: mol_type = other DNA
tcagctcgtctgcctccgtgg

SEQ ID NO: 9991-9999 - skipped (9 entries)

SEQ ID NO: 10000 - DNA, 21 bp, synthetic construct
  source 1..21: mol_type = other DNA
tcacctgccataaatataggg

SEQ ID NO: 10001-10009 - skipped (9 entries)

SEQ ID NO: 10010 - DNA, 21 bp, synthetic construct
  source 1..21: mol_type = other DNA
ccagctcaatctggtgcagca

SEQ ID NO: 10011-10019 - skipped (9 entries)

SEQ ID NO: 10020 - DNA, 21 bp, synthetic construct
  source 1..21: mol_type = other DNA
ctgtagggcaccttgtatctg

SEQ ID NO: 10021-10029 - skipped (9 entries)

SEQ ID NO: 10030 - DNA, 21 bp, synthetic construct
  source 1..21: mol_type = other DNA
tggtcatcatcttggtgtaca

SEQ ID NO: 10031-10039 - skipped (9 entries)

SEQ ID NO: 10040 - DNA, 21 bp, synthetic construct
  source 1..21: mol_type = other DNA
gggccttgccgcagcgcagga

SEQ ID NO: 10041-10049 - skipped (9 entries)

SEQ ID NO: 10050 - DNA, 21 bp, synthetic construct
  source 1..21: mol_type = other DNA
agtatgagggcacctacaagt

SEQ ID NO: 10051-10059 - skipped (9 entries)

SEQ ID NO: 10060 - DNA, 21 bp, synthetic construct
  source 1..21: mol_type = other DNA
ccccactgctgcaccagattg

SEQ ID NO: 10061-10069 - skipped (9 entries)

SEQ ID NO: 10070 - DNA, 21 bp, synthetic construct
  source 1..21: mol_type = other DNA
gcgggagccagatgcacttcg

SEQ ID NO: 10071-10079 - skipped (9 entries)

SEQ ID NO: 10080 - DNA, 21 bp, synthetic construct
  source 1..21: mol_type = other DNA
accccgaggagtcggagctgg

SEQ ID NO: 10081-10089 - skipped (9 entries)

SEQ ID NO: 10090 - DNA, 21 bp, synthetic construct
  source 1..21: mol_type = other DNA
tcaaccccgaggagtcggagc

SEQ ID NO: 10091-10099 - skipped (9 entries)

SEQ ID NO: 10100 - DNA, 21 bp, synthetic construct
  source 1..21: mol_type = other DNA
accagcagtgcaagcgcaacg

SEQ ID NO: 10101-10109 - skipped (9 entries)

SEQ ID NO: 10110 - DNA, 21 bp, synthetic construct
  source 1..21: mol_type = other DNA
atgatgtggccggcgacatct

SEQ ID NO: 10111-10119 - skipped (9 entries)

SEQ ID NO: 10120 - DNA, 21 bp, synthetic construct
  source 1..21: mol_type = other DNA
tcctgcgctgcggcaaggccc

SEQ ID NO: 10121-10129 - skipped (9 entries)

SEQ ID NO: 10130 - DNA, 21 bp, synthetic construct
  source 1..21: mol_type = other DNA
gccacgtaggggtgcccttca

SEQ ID NO: 10131-10139 - skipped (9 entries)

SEQ ID NO: 10140 - DNA, 21 bp, synthetic construct
  source 1..21: mol_type = other DNA
ggaacaggatctgaaactgga

SEQ ID NO: 10141-10149 - skipped (9 entries)

SEQ ID NO: 10150 - DNA, 21 bp, synthetic construct
  source 1..21: mol_type = other DNA
gaaaacaacaaagaagagaca

SEQ ID NO: 10151-10159 - skipped (9 entries)

SEQ ID NO: 10160 - DNA, 21 bp, synthetic construct
  source 1..21: mol_type = other DNA
tcttttaggatgtggatgtag

SEQ ID NO: 10161-10169 - skipped (9 entries)

SEQ ID NO: 10170 - DNA, 21 bp, synthetic construct
  source 1..21: mol_type = other DNA
tttaggatgtggatgtagaag

SEQ ID NO: 10171-10179 - skipped (9 entries)

SEQ ID NO: 10180 - DNA, 21 bp, synthetic construct
  source 1..21: mol_type = other DNA
ggggcagtatactgaagaacc

SEQ ID NO: 10181-10189 - skipped (9 entries)

SEQ ID NO: 10190 - DNA, 21 bp, synthetic construct
  source 1..21: mol_type = other DNA
tcaattggcggggttccattt

SEQ ID NO: 10191-10199 - skipped (9 entries)

SEQ ID NO: 10200 - DNA, 21 bp, synthetic construct
  source 1..21: mol_type = other DNA
cgccttaaatccacagcataa

SEQ ID NO: 10201-10209 - skipped (9 entries)

SEQ ID NO: 10210 - DNA, 21 bp, synthetic construct
  source 1..21: mol_type = other DNA
agattttgtgctatcaattta

SEQ ID NO: 10211-10219 - skipped (9 entries)

SEQ ID NO: 10220 - DNA, 21 bp, synthetic construct
  source 1..21: mol_type = other DNA
ttaagttctagattttgtgct

SEQ ID NO: 10221-10229 - skipped (9 entries)

SEQ ID NO: 10230 - DNA, 21 bp, synthetic construct
  source 1..21: mol_type = other DNA
agaaagcaattaagcttagtc

SEQ ID NO: 10231-10239 - skipped (9 entries)

SEQ ID NO: 10240 - DNA, 21 bp, synthetic construct
  source 1..21: mol_type = other DNA
gatcctgttccagaaagcaat

SEQ ID NO: 10241-10249 - skipped (9 entries)

SEQ ID NO: 10250 - DNA, 21 bp, synthetic construct
  source 1..21: mol_type = other DNA
cttttaaagtacctgttggga

SEQ ID NO: 10251-10259 - skipped (9 entries)

SEQ ID NO: 10260 - DNA, 21 bp, synthetic construct
  source 1..21: mol_type = other DNA
atttctcttttaaagtacctg

SEQ ID NO: 10261-10269 - skipped (9 entries)

SEQ ID NO: 10270 - DNA, 21 bp, synthetic construct
  source 1..21: mol_type = other DNA
tctgtggtgtcgtacctttaa

SEQ ID NO: 10271-10279 - skipped (9 entries)

SEQ ID NO: 10280 - DNA, 21 bp, synthetic construct
  source 1..21: mol_type = other DNA
taccagtgttgatgggtataa

SEQ ID NO: 10281-10289 - skipped (9 entries)

SEQ ID NO: 10290 - DNA, 21 bp, synthetic construct
  source 1..21: mol_type = other DNA
gttcttaccagtgttgatggg

SEQ ID NO: 10291-10299 - skipped (9 entries)

SEQ ID NO: 10300 - DNA, 21 bp, synthetic construct
  source 1..21: mol_type = other DNA
cgtggttcagttcttaccagt

SEQ ID NO: 10301-10309 - skipped (9 entries)

SEQ ID NO: 10310 - DNA, 21 bp, synthetic construct
  source 1..21: mol_type = other DNA
gctgatcaaggagatgttcac

SEQ ID NO: 10311-10319 - skipped (9 entries)

SEQ ID NO: 10320 - DNA, 21 bp, synthetic construct
  source 1..21: mol_type = other DNA
ttttcagctgatcaaggagat

SEQ ID NO: 10321-10329 - skipped (9 entries)

SEQ ID NO: 10330 - DNA, 21 bp, synthetic construct
  source 1..21: mol_type = other DNA
gaacagtttagcatcattaac

SEQ ID NO: 10331-10339 - skipped (9 entries)

SEQ ID NO: 10340 - DNA, 21 bp, synthetic construct
  source 1..21: mol_type = other DNA
ttgttgttttctgaacagttt

SEQ ID NO: 10341-10349 - skipped (9 entries)

SEQ ID NO: 10350 - DNA, 21 bp, synthetic construct
  source 1..21: mol_type = other DNA
gtatactgccccagaactgcc

SEQ ID NO: 10351-10359 - skipped (9 entries)

SEQ ID NO: 10360 - DNA, 21 bp, synthetic construct
  source 1..21: mol_type = other DNA
tcagtatactgccccagaact

SEQ ID NO: 10361-10369 - skipped (9 entries)

SEQ ID NO: 10370 - DNA, 21 bp, synthetic construct
  source 1..21: mol_type = other DNA
atgtgattttttatgctgtgg

SEQ ID NO: 10371-10379 - skipped (9 entries)

SEQ ID NO: 10380 - DNA, 21 bp, synthetic construct
  source 1..21: mol_type = other DNA
ttgtcttttccatgtgatttt

SEQ ID NO: 10381-10389 - skipped (9 entries)

SEQ ID NO: 10390 - DNA, 21 bp, synthetic construct
  source 1..21: mol_type = other DNA
actttagacctctccagtgtg

SEQ ID NO: 10391-10399 - skipped (9 entries)

SEQ ID NO: 10400 - DNA, 21 bp, synthetic construct
  source 1..21: mol_type = other DNA
tccactttagacctctccagt

SEQ ID NO: 10401-10409 - skipped (9 entries)

SEQ ID NO: 10410 - DNA, 21 bp, synthetic construct
  source 1..21: mol_type = other DNA
tgcagaccacagtccatgcca

SEQ ID NO: 10411-10419 - skipped (9 entries)

SEQ ID NO: 10420 - DNA, 21 bp, synthetic construct
  source 1..21: mol_type = other DNA
gcagaccacagtccatgccat

SEQ ID NO: 10421-10429 - skipped (9 entries)

SEQ ID NO: 10430 - DNA, 21 bp, synthetic construct
  source 1..21: mol_type = other DNA
cagaccacagtccatgccatc

SEQ ID NO: 10431-10439 - skipped (9 entries)

SEQ ID NO: 10440 - DNA, 21 bp, synthetic construct
  source 1..21: mol_type = other DNA
tcatcttctaggtatgacaac

SEQ ID NO: 10441-10449 - skipped (9 entries)

SEQ ID NO: 10450 - DNA, 21 bp, synthetic construct
  source 1..21: mol_type = other DNA
catcttctaggtatgacaacg

SEQ ID NO: 10451-10459 - skipped (9 entries)

SEQ ID NO: 10460 - DNA, 21 bp, synthetic construct
  source 1..21: mol_type = other DNA
atcttctaggtatgacaacga

SEQ ID NO: 10461-10469 - skipped (9 entries)

SEQ ID NO: 10470 - DNA, 21 bp, synthetic construct
  source 1..21: mol_type = other DNA
taggtatgacaacgaatttgg

SEQ ID NO: 10471-10479 - skipped (9 entries)

SEQ ID NO: 10480 - DNA, 21 bp, synthetic construct
  source 1..21: mol_type = other DNA
cccagctctcataccatgagt

SEQ ID NO: 10481-10489 - skipped (9 entries)

SEQ ID NO: 10490 - DNA, 21 bp, synthetic construct
  source 1..21: mol_type = other DNA
tatccacagtgaatcttggtt

SEQ ID NO: 10491-10499 - skipped (9 entries)

SEQ ID NO: 10500 - DNA, 21 bp, synthetic construct
  source 1..21: mol_type = other DNA
gttgtaaacttgacctaaaga

SEQ ID NO: 10501-10509 - skipped (9 entries)

SEQ ID NO: 10510 - DNA, 21 bp, synthetic construct
  source 1..21: mol_type = other DNA
taaacttgacctaaagaccat

SEQ ID NO: 10511-10519 - skipped (9 entries)

SEQ ID NO: 10520 - DNA, 21 bp, synthetic construct
  source 1..21: mol_type = other DNA
acctaaagaccattgcacttc

SEQ ID NO: 10521-10529 - skipped (9 entries)

SEQ ID NO: 10530 - DNA, 21 bp, synthetic construct
  source 1..21: mol_type = other DNA
cacttcgtgcccgaaacgccg

SEQ ID NO: 10531-10539 - skipped (9 entries)

SEQ ID NO: 10540 - DNA, 21 bp, synthetic construct
  source 1..21: mol_type = other DNA
gtgcccgaaacgccgaatata

SEQ ID NO: 10541-10549 - skipped (9 entries)

SEQ ID NO: 10550 - DNA, 21 bp, synthetic construct
  source 1..21: mol_type = other DNA
tctctgaccattgtagcggtt

SEQ ID NO: 10551-10559 - skipped (9 entries)

SEQ ID NO: 10560 - DNA, 21 bp, synthetic construct
  source 1..21: mol_type = other DNA
tagcggtttgctgcggtaatc

SEQ ID NO: 10561-10569 - skipped (9 entries)

SEQ ID NO: 10570 - DNA, 21 bp, synthetic construct
  source 1..21: mol_type = other DNA
gctgcggtaatcatgaggata

SEQ ID NO: 10571-10579 - skipped (9 entries)

SEQ ID NO: 10580 - DNA, 21 bp, synthetic construct
  source 1..21: mol_type = other DNA
ctgcggtaatcatgaggataa

SEQ ID NO: 10581-10589 - skipped (9 entries)

SEQ ID NO: 10590 - DNA, 21 bp, synthetic construct
  source 1..21: mol_type = other DNA
tcagttctgggaaaatggtgt

SEQ ID NO: 10591-10599 - skipped (9 entries)

SEQ ID NO: 10600 - DNA, 21 bp, synthetic construct
  source 1..21: mol_type = other DNA
cagttctgggaaaatggtgtg

SEQ ID NO: 10601-10609 - skipped (9 entries)

SEQ ID NO: 10610 - DNA, 21 bp, synthetic construct
  source 1..21: mol_type = other DNA
agttctgggaaaatggtgtgc

SEQ ID NO: 10611-10619 - skipped (9 entries)

SEQ ID NO: 10620 - DNA, 21 bp, synthetic construct
  source 1..21: mol_type = other DNA
tgggaaaatggtgtgcacagg

SEQ ID NO: 10621-10629 - skipped (9 entries)

SEQ ID NO: 10630 - DNA, 21 bp, synthetic construct
  source 1..21: mol_type = other DNA
tttcctttccctagtgaagaa

SEQ ID NO: 10631-10639 - skipped (9 entries)

SEQ ID NO: 10640 - DNA, 21 bp, synthetic construct
  source 1..21: mol_type = other DNA
ttcctttccctagtgaagaac

SEQ ID NO: 10641-10649 - skipped (9 entries)

SEQ ID NO: 10650 - DNA, 21 bp, synthetic construct
  source 1..21: mol_type = other DNA
tcctttccctagtgaagaaca

SEQ ID NO: 10651-10659 - skipped (9 entries)

SEQ ID NO: 10660 - DNA, 21 bp, synthetic construct
  source 1..21: mol_type = other DNA
cctttccctagtgaagaacag

SEQ ID NO: 10661-10669 - skipped (9 entries)

SEQ ID NO: 10670 - DNA, 21 bp, synthetic construct
  source 1..21: mol_type = other DNA
ctttccctagtgaagaacagt

SEQ ID NO: 10671-10679 - skipped (9 entries)

SEQ ID NO: 10680 - DNA, 21 bp, synthetic construct
  source 1..21: mol_type = other DNA
ccctagtgaagaacagtccag

SEQ ID NO: 10681-10689 - skipped (9 entries)

SEQ ID NO: 10690 - DNA, 21 bp, synthetic construct
  source 1..21: mol_type = other DNA
cctagtgaagaacagtccaga

SEQ ID NO: 10691-10699 - skipped (9 entries)

SEQ ID NO: 10700 - DNA, 21 bp, synthetic construct
  source 1..21: mol_type = other DNA
tacagaagttgggttttccag

SEQ ID NO: 10701-10709 - skipped (9 entries)

SEQ ID NO: 10710 - DNA, 21 bp, synthetic construct
  source 1..21: mol_type = other DNA
ggttttccagctaagttcttg

SEQ ID NO: 10711-10719 - skipped (9 entries)

SEQ ID NO: 10720 - DNA, 21 bp, synthetic construct
  source 1..21: mol_type = other DNA
tccagctaagttcttggactt

SEQ ID NO: 10721-10729 - skipped (9 entries)

SEQ ID NO: 10730 - DNA, 21 bp, synthetic construct
  source 1..21: mol_type = other DNA
ccagctaagttcttggacttc

SEQ ID NO: 10731-10739 - skipped (9 entries)

SEQ ID NO: 10740 - DNA, 21 bp, synthetic construct
  source 1..21: mol_type = other DNA
cagctaagttcttggacttca

SEQ ID NO: 10741-10749 - skipped (9 entries)

SEQ ID NO: 10750 - DNA, 21 bp, synthetic construct
  source 1..21: mol_type = other DNA
ttggacttcaagattcagaat

SEQ ID NO: 10751-10759 - skipped (9 entries)

SEQ ID NO: 10760 - DNA, 21 bp, synthetic construct
  source 1..21: mol_type = other DNA
gacttcaagattcagaatatg

SEQ ID NO: 10761-10769 - skipped (9 entries)

SEQ ID NO: 10770 - DNA, 21 bp, synthetic construct
  source 1..21: mol_type = other DNA
aagattcagaatatggtgggg

SEQ ID NO: 10771-10779 - skipped (9 entries)

SEQ ID NO: 10780 - DNA, 21 bp, synthetic construct
  source 1..21: mol_type = other DNA
agaatatggtggggagctgtg

SEQ ID NO: 10781-10789 - skipped (9 entries)

SEQ ID NO: 10790 - DNA, 21 bp, synthetic construct
  source 1..21: mol_type = other DNA
cctataaggttagaaggcctt

SEQ ID NO: 10791-10799 - skipped (9 entries)

SEQ ID NO: 10800 - DNA, 21 bp, synthetic construct
  source 1..21: mol_type = other DNA
ctataaggttagaaggccttg

SEQ ID NO: 10801-10809 - skipped (9 entries)

SEQ ID NO: 10810 - DNA, 21 bp, synthetic construct
  source 1..21: mol_type = other DNA
tgctcacccaccaacaattta

SEQ ID NO: 10811-10819 - skipped (9 entries)

SEQ ID NO: 10820 - DNA, 21 bp, synthetic construct
  source 1..21: mol_type = other DNA
ttgcaattttccttctagtta

SEQ ID NO: 10821-10829 - skipped (9 entries)

SEQ ID NO: 10830 - DNA, 21 bp, synthetic construct
  source 1..21: mol_type = other DNA
tgcaattttccttctagttat

SEQ ID NO: 10831-10839 - skipped (9 entries)

SEQ ID NO: 10840 - DNA, 21 bp, synthetic construct
  source 1..21: mol_type = other DNA
gcaattttccttctagttatg

SEQ ID NO: 10841-10849 - skipped (9 entries)

SEQ ID NO: 10850 - DNA, 21 bp, synthetic construct
  source 1..21: mol_type = other DNA
caattttccttctagttatga

SEQ ID NO: 10851-10859 - skipped (9 entries)

SEQ ID NO: 10860 - DNA, 21 bp, synthetic construct
  source 1..21: mol_type = other DNA
tccttctagttatgagccaga

SEQ ID NO: 10861-10869 - skipped (9 entries)

SEQ ID NO: 10870 - DNA, 21 bp, synthetic construct
  source 1..21: mol_type = other DNA
ccttctagttatgagccagag

SEQ ID NO: 10871-10879 - skipped (9 entries)

SEQ ID NO: 10880 - DNA, 21 bp, synthetic construct
  source 1..21: mol_type = other DNA
cttctagttatgagccagagt

SEQ ID NO: 10881-10889 - skipped (9 entries)

SEQ ID NO: 10890 - DNA, 21 bp, synthetic construct
  source 1..21: mol_type = other DNA
tagttatgagccagagttatt

SEQ ID NO: 10891-10899 - skipped (9 entries)

SEQ ID NO: 10900 - DNA, 21 bp, synthetic construct
  source 1..21: mol_type = other DNA
tgagccagagttatttcctgg

SEQ ID NO: 10901-10909 - skipped (9 entries)

SEQ ID NO: 10910 - DNA, 21 bp, synthetic construct
  source 1..21: mol_type = other DNA
cctggtttaatctacagaatg

SEQ ID NO: 10911-10919 - skipped (9 entries)

SEQ ID NO: 10920 - DNA, 21 bp, synthetic construct
  source 1..21: mol_type = other DNA
ctggtttaatctacagaatga

SEQ ID NO: 10921-10929 - skipped (9 entries)

SEQ ID NO: 10930 - DNA, 21 bp, synthetic construct
  source 1..21: mol_type = other DNA
aatctacagaatgatcaaacc

SEQ ID NO: 10931-10939 - skipped (9 entries)

SEQ ID NO: 10940 - DNA, 21 bp, synthetic construct
  source 1..21: mol_type = other DNA
atctacagaatgatcaaaccc

SEQ ID NO: 10941-10949 - skipped (9 entries)

SEQ ID NO: 10950 - DNA, 21 bp, synthetic construct
  source 1..21: mol_type = other DNA
ttctccttatttttgtttctg

SEQ ID NO: 10951-10959 - skipped (9 entries)

SEQ ID NO: 10960 - DNA, 21 bp, synthetic construct
  source 1..21: mol_type = other DNA
tccttatttttgtttctggaa

SEQ ID NO: 10961-10969 - skipped (9 entries)

SEQ ID NO: 10970 - DNA, 21 bp, synthetic construct
  source 1..21: mol_type = other DNA
tttttgtttctggaaaagttg

SEQ ID NO: 10971-10979 - skipped (9 entries)

SEQ ID NO: 10980 - DNA, 21 bp, synthetic construct
  source 1..21: mol_type = other DNA
ttgtttctggaaaagttgtat

SEQ ID NO: 10981-10989 - skipped (9 entries)

SEQ ID NO: 10990 - DNA, 21 bp, synthetic construct
  source 1..21: mol_type = other DNA
tgtttctggaaaagttgtatt

SEQ ID NO: 10991-10999 - skipped (9 entries)

SEQ ID NO: 11000 - DNA, 21 bp, synthetic construct
  source 1..21: mol_type = other DNA
gtttctggaaaagttgtatta

SEQ ID NO: 11001-11009 - skipped (9 entries)

SEQ ID NO: 11010 - DNA, 21 bp, synthetic construct
  source 1..21: mol_type = other DNA
tttctggaaaagttgtattaa

SEQ ID NO: 11011-11019 - skipped (9 entries)

SEQ ID NO: 11020 - DNA, 21 bp, synthetic construct
  source 1..21: mol_type = other DNA
ctggaaaagttgtattaacag

SEQ ID NO: 11021-11029 - skipped (9 entries)

SEQ ID NO: 11030 - DNA, 21 bp, synthetic construct
  source 1..21: mol_type = other DNA
tggaaaagttgtattaacagg

SEQ ID NO: 11031-11039 - skipped (9 entries)

SEQ ID NO: 11040 - DNA, 21 bp, synthetic construct
  source 1..21: mol_type = other DNA
tcttcttaggtgctaaagtca

SEQ ID NO: 11041-11049 - skipped (9 entries)

SEQ ID NO: 11050 - DNA, 21 bp, synthetic construct
  source 1..21: mol_type = other DNA
ttaggtgctaaagtcagagca

SEQ ID NO: 11051-11059 - skipped (9 entries)

SEQ ID NO: 11060 - DNA, 21 bp, synthetic construct
  source 1..21: mol_type = other DNA
ggtgctaaagtcagagcagaa

SEQ ID NO: 11061-11069 - skipped (9 entries)

SEQ ID NO: 11070 - DNA, 21 bp, synthetic construct
  source 1..21: mol_type = other DNA
taaagggattcaggaagacga

SEQ ID NO: 11071-11079 - skipped (9 entries)

SEQ ID NO: 11080 - DNA, 21 bp, synthetic construct
  source 1..21: mol_type = other DNA
ggtcaagtttacaaccaagat

SEQ ID NO: 11081-11089 - skipped (9 entries)

SEQ ID NO: 11090 - DNA, 21 bp, synthetic construct
  source 1..21: mol_type = other DNA
aggtcaagtttacaaccaaga

SEQ ID NO: 11091-11099 - skipped (9 entries)

SEQ ID NO: 11100 - DNA, 21 bp, synthetic construct
  source 1..21: mol_type = other DNA
gggcacgaagtgcaatggtct

SEQ ID NO: 11101-11109 - skipped (9 entries)

SEQ ID NO: 11110 - DNA, 21 bp, synthetic construct
  source 1..21: mol_type = other DNA
cgggcacgaagtgcaatggtc

SEQ ID NO: 11111-11119 - skipped (9 entries)

SEQ ID NO: 11120 - DNA, 21 bp, synthetic construct
  source 1..21: mol_type = other DNA
ggcgtttcgggcacgaagtgc

SEQ ID NO: 11121-11129 - skipped (9 entries)

SEQ ID NO: 11130 - DNA, 21 bp, synthetic construct
  source 1..21: mol_type = other DNA
tattcggcgtttcgggcacga

SEQ ID NO: 11131-11139 - skipped (9 entries)

SEQ ID NO: 11140 - DNA, 21 bp, synthetic construct
  source 1..21: mol_type = other DNA
ggattatattcggcgtttcgg

SEQ ID NO: 11141-11149 - skipped (9 entries)

SEQ ID NO: 11150 - DNA, 21 bp, synthetic construct
  source 1..21: mol_type = other DNA
aaatagatctaaccttgggat

SEQ ID NO: 11151-11159 - skipped (9 entries)

SEQ ID NO: 11160 - DNA, 21 bp, synthetic construct
  source 1..21: mol_type = other DNA
tcctcatgattaccgcagcaa

SEQ ID NO: 11161-11169 - skipped (9 entries)

SEQ ID NO: 11170 - DNA, 21 bp, synthetic construct
  source 1..21: mol_type = other DNA
gtggctctcttatcctcatga

SEQ ID NO: 11171-11179 - skipped (9 entries)

SEQ ID NO: 11180 - DNA, 21 bp, synthetic construct
  source 1..21: mol_type = other DNA
ccagaactgaaaatcagtgcc

SEQ ID NO: 11181-11189 - skipped (9 entries)

SEQ ID NO: 11190 - DNA, 21 bp, synthetic construct
  source 1..21: mol_type = other DNA
cccagaactgaaaatcagtgc

SEQ ID NO: 11191-11199 - skipped (9 entries)

SEQ ID NO: 11200 - DNA, 21 bp, synthetic construct
  source 1..21: mol_type = other DNA
tcccagaactgaaaatcagtg

SEQ ID NO: 11201-11209 - skipped (9 entries)

SEQ ID NO: 11210 - DNA, 21 bp, synthetic construct
  source 1..21: mol_type = other DNA
gctcctgtgcacaccattttc

SEQ ID NO: 11211-11219 - skipped (9 entries)

SEQ ID NO: 11220 - DNA, 21 bp, synthetic construct
  source 1..21: mol_type = other DNA
cggctacctcttggctcctgt

SEQ ID NO: 11221-11229 - skipped (9 entries)

SEQ ID NO: 11230 - DNA, 21 bp, synthetic construct
  source 1..21: mol_type = other DNA
ttacggctacctcttggctcc

SEQ ID NO: 11231-11239 - skipped (9 entries)

SEQ ID NO: 11240 - DNA, 21 bp, synthetic construct
  source 1..21: mol_type = other DNA
cttacggctacctcttggctc

SEQ ID NO: 11241-11249 - skipped (9 entries)

SEQ ID NO: 11250 - DNA, 21 bp, synthetic construct
  source 1..21: mol_type = other DNA
ctgccagtctggactgttctt

SEQ ID NO: 11251-11259 - skipped (9 entries)

SEQ ID NO: 11260 - DNA, 21 bp, synthetic construct
  source 1..21: mol_type = other DNA
ttgctgccagtctggactgtt

SEQ ID NO: 11261-11269 - skipped (9 entries)

SEQ ID NO: 11270 - DNA, 21 bp, synthetic construct
  source 1..21: mol_type = other DNA
cttgctgccagtctggactgt

SEQ ID NO: 11271-11279 - skipped (9 entries)

SEQ ID NO: 11280 - DNA, 21 bp, synthetic construct
  source 1..21: mol_type = other DNA
tcttgctgccagtctggactg

SEQ ID NO: 11281-11289 - skipped (9 entries)

SEQ ID NO: 11290 - DNA, 21 bp, synthetic construct
  source 1..21: mol_type = other DNA
tgtacaactctagcatatttt

SEQ ID NO: 11291-11299 - skipped (9 entries)

SEQ ID NO: 11300 - DNA, 21 bp, synthetic construct
  source 1..21: mol_type = other DNA
gctggaaaacccaacttctgt

SEQ ID NO: 11301-11309 - skipped (9 entries)

SEQ ID NO: 11310 - DNA, 21 bp, synthetic construct
  source 1..21: mol_type = other DNA
aagtccaagaacttagctgga

SEQ ID NO: 11311-11319 - skipped (9 entries)

SEQ ID NO: 11320 - DNA, 21 bp, synthetic construct
  source 1..21: mol_type = other DNA
tgaatcttgaagtccaagaac

SEQ ID NO: 11321-11329 - skipped (9 entries)

SEQ ID NO: 11330 - DNA, 21 bp, synthetic construct
  source 1..21: mol_type = other DNA
acatcacagctccccaccata

SEQ ID NO: 11331-11339 - skipped (9 entries)

SEQ ID NO: 11340 - DNA, 21 bp, synthetic construct
  source 1..21: mol_type = other DNA
taaccttataggaaacttcac

SEQ ID NO: 11341-11349 - skipped (9 entries)

SEQ ID NO: 11350 - DNA, 21 bp, synthetic construct
  source 1..21: mol_type = other DNA
gtgggtgagcacaaggccttc

SEQ ID NO: 11351-11359 - skipped (9 entries)

SEQ ID NO: 11360 - DNA, 21 bp, synthetic construct
  source 1..21: mol_type = other DNA
ttggtgggtgagcacaaggcc

SEQ ID NO: 11361-11369 - skipped (9 entries)

SEQ ID NO: 11370 - DNA, 21 bp, synthetic construct
  source 1..21: mol_type = other DNA
cctactaaattgttggtgggt

SEQ ID NO: 11371-11379 - skipped (9 entries)

SEQ ID NO: 11380 - DNA, 21 bp, synthetic construct
  source 1..21: mol_type = other DNA
agacttacctactaaattgtt

SEQ ID NO: 11381-11389 - skipped (9 entries)

SEQ ID NO: 11390 - DNA, 21 bp, synthetic construct
  source 1..21: mol_type = other DNA
cagacttacctactaaattgt

SEQ ID NO: 11391-11399 - skipped (9 entries)

SEQ ID NO: 11400 - DNA, 21 bp, synthetic construct
  source 1..21: mol_type = other DNA
aaccaggaaataactctggct

SEQ ID NO: 11401-11409 - skipped (9 entries)

SEQ ID NO: 11410 - DNA, 21 bp, synthetic construct
  source 1..21: mol_type = other DNA
tgtagattaaaccaggaaata

SEQ ID NO: 11411-11419 - skipped (9 entries)

SEQ ID NO: 11420 - DNA, 21 bp, synthetic construct
  source 1..21: mol_type = other DNA
atcattctgtagattaaacca

SEQ ID NO: 11421-11429 - skipped (9 entries)

SEQ ID NO: 11430 - DNA, 21 bp, synthetic construct
  source 1..21: mol_type = other DNA
gatcattctgtagattaaacc

SEQ ID NO: 11431-11439 - skipped (9 entries)

SEQ ID NO: 11440 - DNA, 21 bp, synthetic construct
  source 1..21: mol_type = other DNA
tgggtttgatcattctgtaga

SEQ ID NO: 11441-11449 - skipped (9 entries)

SEQ ID NO: 11450 - DNA, 21 bp, synthetic construct
  source 1..21: mol_type = other DNA
cagaaacaaaaataaggagaa

SEQ ID NO: 11451-11459 - skipped (9 entries)

SEQ ID NO: 11460 - DNA, 21 bp, synthetic construct
  source 1..21: mol_type = other DNA
ccagaaacaaaaataaggaga

SEQ ID NO: 11461-11469 - skipped (9 entries)

SEQ ID NO: 11470 - DNA, 21 bp, synthetic construct
  source 1..21: mol_type = other DNA
tccagaaacaaaaataaggag

SEQ ID NO: 11471-11479 - skipped (9 entries)

SEQ ID NO: 11480 - DNA, 21 bp, synthetic construct
  source 1..21: mol_type = other DNA
atacaacttttccagaaacaa

SEQ ID NO: 11481-11489 - skipped (9 entries)

SEQ ID NO: 11490 - DNA, 21 bp, synthetic construct
  source 1..21: mol_type = other DNA
cctgttaatacaacttttcca

SEQ ID NO: 11491-11499 - skipped (9 entries)

SEQ ID NO: 11500 - DNA, 21 bp, synthetic construct
  source 1..21: mol_type = other DNA
caacttacctgttaatacaac

SEQ ID NO: 11501-11509 - skipped (9 entries)

SEQ ID NO: 11510 - DNA, 21 bp, synthetic construct
  source 1..21: mol_type = other DNA
ctgttacaacttacctgttaa

SEQ ID NO: 11511-11519 - skipped (9 entries)

SEQ ID NO: 11520 - DNA, 21 bp, synthetic construct
  source 1..21: mol_type = other DNA
tgctctgactttagcacctaa

SEQ ID NO: 11521-11529 - skipped (9 entries)

SEQ ID NO: 11530 - DNA, 21 bp, synthetic construct
  source 1..21: mol_type = other DNA
ctgctctgactttagcaccta

SEQ ID NO: 11531-11539 - skipped (9 entries)

SEQ ID NO: 11540 - DNA, 21 bp, synthetic construct
  source 1..21: mol_type = other DNA
ataaatttctgctctgacttt

SEQ ID NO: 11541-11549 - skipped (9 entries)

SEQ ID NO: 11550 - DNA, 21 bp, synthetic construct
  source 1..21: mol_type = other DNA
aaatgcttcataaatttctgc

SEQ ID NO: 11551-11559 - skipped (9 entries)

SEQ ID NO: 11560 - DNA, 21 bp, synthetic construct
  source 1..21: mol_type = other DNA
caaatgcttcataaatttctg

SEQ ID NO: 11561-11569 - skipped (9 entries)

SEQ ID NO: 11570 - DNA, 21 bp, synthetic construct
  source 1..21: mol_type = other DNA
tcaaatgcttcataaatttct

SEQ ID NO: 11571-11579 - skipped (9 entries)

SEQ ID NO: 11580 - DNA, 21 bp, synthetic construct
  source 1..21: mol_type = other DNA
ctgaatccctttagaataggg

SEQ ID NO: 11581-11589 - skipped (9 entries)

SEQ ID NO: 11590 - DNA, 21 bp, synthetic construct
  source 1..21: mol_type = other DNA
cgtcgtcttcctgaatccctt

SEQ ID NO: 11591-11599 - skipped (9 entries)

SEQ ID NO: 11600 - DNA, 21 bp, synthetic construct
  source 1..21: mol_type = other DNA
gggggctatcattgtagtgag

SEQ ID NO: 11601-11609 - skipped (9 entries)

SEQ ID NO: 11610 - DNA, 21 bp, synthetic construct
  source 1..21: mol_type = other DNA
ggggctatcattgtagtgagt

SEQ ID NO: 11611-11619 - skipped (9 entries)

SEQ ID NO: 11620 - DNA, 21 bp, synthetic construct
  source 1..21: mol_type = other DNA
tagtgagtggcggccctggga

SEQ ID NO: 11621-11629 - skipped (9 entries)

SEQ ID NO: 11630 - DNA, 21 bp, synthetic construct
  source 1..21: mol_type = other DNA
actcccactgggcccaacaac

SEQ ID NO: 11631-11639 - skipped (9 entries)

SEQ ID NO: 11640 - DNA, 21 bp, synthetic construct
  source 1..21: mol_type = other DNA
tgccctgctggacagcagcag

SEQ ID NO: 11641-11649 - skipped (9 entries)

SEQ ID NO: 11650 - DNA, 21 bp, synthetic construct
  source 1..21: mol_type = other DNA
gtccggacccaacccttctac

SEQ ID NO: 11651-11659 - skipped (9 entries)

SEQ ID NO: 11660 - DNA, 21 bp, synthetic construct
  source 1..21: mol_type = other DNA
tacctcctttgagcccatcaa

SEQ ID NO: 11661-11669 - skipped (9 entries)

SEQ ID NO: 11670 - DNA, 21 bp, synthetic construct
  source 1..21: mol_type = other DNA
gagcccatcaaggcagacccc

SEQ ID NO: 11671-11679 - skipped (9 entries)

SEQ ID NO: 11680 - DNA, 21 bp, synthetic construct
  source 1..21: mol_type = other DNA
agcccatcaaggcagacccca

SEQ ID NO: 11681-11689 - skipped (9 entries)

SEQ ID NO: 11690 - DNA, 21 bp, synthetic construct
  source 1..21: mol_type = other DNA
cttgtttttcagttttggaac

SEQ ID NO: 11691-11699 - skipped (9 entries)

SEQ ID NO: 11700 - DNA, 21 bp, synthetic construct
  source 1..21: mol_type = other DNA
tttttcagttttggaactccc

SEQ ID NO: 11701-11709 - skipped (9 entries)

SEQ ID NO: 11710 - DNA, 21 bp, synthetic construct
  source 1..21: mol_type = other DNA
ttcagttttggaactccccaa

SEQ ID NO: 11711-11719 - skipped (9 entries)

SEQ ID NO: 11720 - DNA, 21 bp, synthetic construct
  source 1..21: mol_type = other DNA
tcagttttggaactccccaaa

SEQ ID NO: 11721-11729 - skipped (9 entries)

SEQ ID NO: 11730 - DNA, 21 bp, synthetic construct
  source 1..21: mol_type = other DNA
cagttttggaactccccaaag

SEQ ID NO: 11731-11739 - skipped (9 entries)

SEQ ID NO: 11740 - DNA, 21 bp, synthetic construct
  source 1..21: mol_type = other DNA
agttttggaactccccaaaga

SEQ ID NO: 11741-11749 - skipped (9 entries)

SEQ ID NO: 11750 - DNA, 21 bp, synthetic construct
  source 1..21: mol_type = other DNA
tggaactccccaaagagctgt

SEQ ID NO: 11751-11759 - skipped (9 entries)

SEQ ID NO: 11760 - DNA, 21 bp, synthetic construct
  source 1..21: mol_type = other DNA
ggaactccccaaagagctgtc

SEQ ID NO: 11761-11769 - skipped (9 entries)

SEQ ID NO: 11770 - DNA, 21 bp, synthetic construct
  source 1..21: mol_type = other DNA
ccagagtgcatgagctcggag

SEQ ID NO: 11771-11779 - skipped (9 entries)

SEQ ID NO: 11780 - DNA, 21 bp, synthetic construct
  source 1..21: mol_type = other DNA
gcccctctgcttcgtctttct

SEQ ID NO: 11781-11789 - skipped (9 entries)

SEQ ID NO: 11790 - DNA, 21 bp, synthetic construct
  source 1..21: mol_type = other DNA
cccctctgcttcgtctttctc

SEQ ID NO: 11791-11799 - skipped (9 entries)

SEQ ID NO: 11800 - DNA, 21 bp, synthetic construct
  source 1..21: mol_type = other DNA
gtctttctccacccccgggag

SEQ ID NO: 11801-11809 - skipped (9 entries)

SEQ ID NO: 11810 - DNA, 21 bp, synthetic construct
  source 1..21: mol_type = other DNA
ctccacccccgggagaccacg

SEQ ID NO: 11811-11819 - skipped (9 entries)

SEQ ID NO: 11820 - DNA, 21 bp, synthetic construct
  source 1..21: mol_type = other DNA
tccacccccgggagaccacga

SEQ ID NO: 11821-11829 - skipped (9 entries)

SEQ ID NO: 11830 - DNA, 21 bp, synthetic construct
  source 1..21: mol_type = other DNA
tatctacaacctggacgagag

SEQ ID NO: 11831-11839 - skipped (9 entries)

SEQ ID NO: 11840 - DNA, 21 bp, synthetic construct
  source 1..21: mol_type = other DNA
gatgtgcctgttctcaacctc

SEQ ID NO: 11841-11849 - skipped (9 entries)

SEQ ID NO: 11850 - DNA, 21 bp, synthetic construct
  source 1..21: mol_type = other DNA
atgtgcctgttctcaacctct

SEQ ID NO: 11851-11859 - skipped (9 entries)

SEQ ID NO: 11860 - DNA, 21 bp, synthetic construct
  source 1..21: mol_type = other DNA
tgcactgccagggacagcagt

SEQ ID NO: 11861-11869 - skipped (9 entries)

SEQ ID NO: 11870 - DNA, 21 bp, synthetic construct
  source 1..21: mol_type = other DNA
cctggacttctgcactgccag

SEQ ID NO: 11871-11879 - skipped (9 entries)

SEQ ID NO: 11880 - DNA, 21 bp, synthetic construct
  source 1..21: mol_type = other DNA
ctatcagtcccagggccgcca

SEQ ID NO: 11881-11889 - skipped (9 entries)

SEQ ID NO: 11890 - DNA, 21 bp, synthetic construct
  source 1..21: mol_type = other DNA
ggcccagtgggagtgaactga

SEQ ID NO: 11891-11899 - skipped (9 entries)

SEQ ID NO: 11900 - DNA, 21 bp, synthetic construct
  source 1..21: mol_type = other DNA
ttgggcccagtgggagtgaac

SEQ ID NO: 11901-11909 - skipped (9 entries)

SEQ ID NO: 11910 - DNA, 21 bp, synthetic construct
  source 1..21: mol_type = other DNA
ggtccggacgaactgctgctg

SEQ ID NO: 11911-11919 - skipped (9 entries)

SEQ ID NO: 11920 - DNA, 21 bp, synthetic construct
  source 1..21: mol_type = other DNA
atgggctcaaaggaggtagaa

SEQ ID NO: 11921-11929 - skipped (9 entries)

SEQ ID NO: 11930 - DNA, 21 bp, synthetic construct
  source 1..21: mol_type = other DNA
tgacagctctttggggagttc

SEQ ID NO: 11931-11939 - skipped (9 entries)

SEQ ID NO: 11940 - DNA, 21 bp, synthetic construct
  source 1..21: mol_type = other DNA
ctgacagctctttggggagtt

SEQ ID NO: 11941-11949 - skipped (9 entries)

SEQ ID NO: 11950 - DNA, 21 bp, synthetic construct
  source 1..21: mol_type = other DNA
tgaggacatcaactcctccag

SEQ ID NO: 11951-11959 - skipped (9 entries)

SEQ ID NO: 11960 - DNA, 21 bp, synthetic construct
  source 1..21: mol_type = other DNA
cagggccacccaccttctgag

SEQ ID NO: 11961-11969 - skipped (9 entries)

SEQ ID NO: 11970 - DNA, 21 bp, synthetic construct
  source 1..21: mol_type = other DNA
tagatataatcgtggtctccc

SEQ ID NO: 11971-11979 - skipped (9 entries)

SEQ ID NO: 11980 - DNA, 21 bp, synthetic construct
  source 1..21: mol_type = other DNA
actctcgtccaggttgtagat

SEQ ID NO: 11981-11989 - skipped (9 entries)

SEQ ID NO: 11990 - DNA, 21 bp, synthetic construct
  source 1..21: mol_type = other DNA
tgggggttcacccacttgtag

SEQ ID NO: 11991-11999 - skipped (9 entries)

SEQ ID NO: 12000 - DNA, 21 bp, synthetic construct
  source 1..21: mol_type = other DNA
acccacttgtaggtgccctca

SEQ ID NO: 12001-12009 - skipped (9 entries)

SEQ ID NO: 12010 - DNA, 21 bp, synthetic construct
  source 1..21: mol_type = other DNA
taggtgccctcatactggaaa

SEQ ID NO: 12011-12019 - skipped (9 entries)

SEQ ID NO: 12020 - DNA, 21 bp, synthetic construct
  source 1..21: mol_type = other DNA
atcagctcgtctgcctccgtg

SEQ ID NO: 12021-12029 - skipped (9 entries)

SEQ ID NO: 12030 - DNA, 21 bp, synthetic construct
  source 1..21: mol_type = other DNA
cctcacctgccataaatatag

SEQ ID NO: 12031-12039 - skipped (9 entries)

SEQ ID NO: 12040 - DNA, 21 bp, synthetic construct
  source 1..21: mol_type = other DNA
ctcacctgccataaatatagg

SEQ ID NO: 12041-12049 - skipped (9 entries)

SEQ ID NO: 12050 - DNA, 21 bp, synthetic construct
  source 1..21: mol_type = other DNA
ggcttctccagctcaatctgg

SEQ ID NO: 12051-12059 - skipped (9 entries)

SEQ ID NO: 12060 - DNA, 21 bp, synthetic construct
  source 1..21: mol_type = other DNA
tccagctcaatctggtgcagc

SEQ ID NO: 12061-12069 - skipped (9 entries)

SEQ ID NO: 12070 - DNA, 21 bp, synthetic construct
  source 1..21: mol_type = other DNA
tctgtagggcaccttgtatct

SEQ ID NO: 12071-12079 - skipped (9 entries)

SEQ ID NO: 12080 - DNA, 21 bp, synthetic construct
  source 1..21: mol_type = other DNA
tatctgttgccgtaggtcagg

SEQ ID NO: 12081-12089 - skipped (9 entries)

SEQ ID NO: 12090 - DNA, 21 bp, synthetic construct
  source 1..21: mol_type = other DNA
ccgtaggtcaggtccagctcc

SEQ ID NO: 12091-12099 - skipped (9 entries)

SEQ ID NO: 12100 - DNA, 21 bp, synthetic construct
  source 1..21: mol_type = other DNA
aagaacatgcccggcttcttg

SEQ ID NO: 12101-12109 - skipped (9 entries)

SEQ ID NO: 12110 - DNA, 21 bp, synthetic construct
  source 1..21: mol_type = other DNA
ttggtcatcatcttggtgtac

SEQ ID NO: 12111-12119 - skipped (9 entries)

SEQ ID NO: 12120 - DNA, 21 bp, synthetic construct
  source 1..21: mol_type = other DNA
gtcatcatcttggtgtacacg

SEQ ID NO: 12121-12129 - skipped (9 entries)

SEQ ID NO: 12130 - DNA, 21 bp, synthetic construct
  source 1..21: mol_type = other DNA
gtgtacacggcctcgttgggc

SEQ ID NO: 12131-12139 - skipped (9 entries)

SEQ ID NO: 12140 - DNA, 21 bp, synthetic construct
  source 1..21: mol_type = other DNA
ggctgcacgcggatcaccagc

SEQ ID NO: 12141-12149 - skipped (9 entries)

SEQ ID NO: 12150 - DNA, 21 bp, synthetic construct
  source 1..21: mol_type = other DNA
cgcttgcactgctggtggaag

SEQ ID NO: 12151-12159 - skipped (9 entries)

SEQ ID NO: 12160 - DNA, 21 bp, synthetic construct
  source 1..21: mol_type = other DNA
cactgctggtggaagatgtcg

SEQ ID NO: 12161-12169 - skipped (9 entries)

SEQ ID NO: 12170 - DNA, 21 bp, synthetic construct
  source 1..21: mol_type = other DNA
cgctcgttcagggccttgccg

SEQ ID NO: 12171-12179 - skipped (9 entries)

SEQ ID NO: 12180 - DNA, 21 bp, synthetic construct
  source 1..21: mol_type = other DNA
agggccttgccgcagcgcagg

SEQ ID NO: 12181-12189 - skipped (9 entries)

SEQ ID NO: 12190 - DNA, 21 bp, synthetic construct
  source 1..21: mol_type = other DNA
ccgcagcgcaggatgaagggc

SEQ ID NO: 12191-12199 - skipped (9 entries)

SEQ ID NO: 12200 - DNA, 21 bp, synthetic construct
  source 1..21: mol_type = other DNA
cagtatgagggcacctacaag

SEQ ID NO: 12201-12209 - skipped (9 entries)

SEQ ID NO: 12210 - DNA, 21 bp, synthetic construct
  source 1..21: mol_type = other DNA
ccagtatgagggcacctacaa

SEQ ID NO: 12211-12219 - skipped (9 entries)

SEQ ID NO: 12220 - DNA, 21 bp, synthetic construct
  source 1..21: mol_type = other DNA
agctggagaagcccaagccca

SEQ ID NO: 12221-12229 - skipped (9 entries)

SEQ ID NO: 12230 - DNA, 21 bp, synthetic construct
  source 1..21: mol_type = other DNA
accccactgctgcaccagatt

SEQ ID NO: 12231-12239 - skipped (9 entries)

SEQ ID NO: 12240 - DNA, 21 bp, synthetic construct
  source 1..21: mol_type = other DNA
caccccactgctgcaccagat

SEQ ID NO: 12241-12249 - skipped (9 entries)

SEQ ID NO: 12250 - DNA, 21 bp, synthetic construct
  source 1..21: mol_type = other DNA
tcaccccactgctgcaccaga

SEQ ID NO: 12251-12259 - skipped (9 entries)

SEQ ID NO: 12260 - DNA, 21 bp, synthetic construct
  source 1..21: mol_type = other DNA
tgcgggagccagatgcacttc

SEQ ID NO: 12261-12269 - skipped (9 entries)

SEQ ID NO: 12270 - DNA, 21 bp, synthetic construct
  source 1..21: mol_type = other DNA
aaccccgaggagtcggagctg

SEQ ID NO: 12271-12279 - skipped (9 entries)

SEQ ID NO: 12280 - DNA, 21 bp, synthetic construct
  source 1..21: mol_type = other DNA
ttcaaccccgaggagtcggag

SEQ ID NO: 12281-12289 - skipped (9 entries)

SEQ ID NO: 12290 - DNA, 21 bp, synthetic construct
  source 1..21: mol_type = other DNA
caccagcagtgcaagcgcaac

SEQ ID NO: 12291-12299 - skipped (9 entries)

SEQ ID NO: 12300 - DNA, 21 bp, synthetic construct
  source 1..21: mol_type = other DNA
catgatgtggccggcgacatc

SEQ ID NO: 12301-12309 - skipped (9 entries)

SEQ ID NO: 12310 - DNA, 21 bp, synthetic construct
  source 1..21: mol_type = other DNA
atcctgcgctgcggcaaggcc

SEQ ID NO: 12311-12319 - skipped (9 entries)

SEQ ID NO: 12320 - DNA, 21 bp, synthetic construct
  source 1..21: mol_type = other DNA
cgccacgtaggggtgcccttc

SEQ ID NO: 12321-12329 - skipped (9 entries)

SEQ ID NO: 12330 - DNA, 21 bp, synthetic construct
  source 1..21: mol_type = other DNA
ccgccacgtaggggtgccctt

SEQ ID NO: 12331-12339 - skipped (9 entries)

SEQ ID NO: 12340 - DNA, 21 bp, synthetic construct
  source 1..21: mol_type = other DNA
atgaagataaattgatagcac

SEQ ID NO: 12341-12349 - skipped (9 entries)

SEQ ID NO: 12350 - DNA, 21 bp, synthetic construct
  source 1..21: mol_type = other DNA
atagcacaaaatctagaactt

SEQ ID NO: 12351-12359 - skipped (9 entries)

SEQ ID NO: 12360 - DNA, 21 bp, synthetic construct
  source 1..21: mol_type = other DNA
atgaaaccataaaaattggtt

SEQ ID NO: 12361-12369 - skipped (9 entries)

SEQ ID NO: 12370 - DNA, 21 bp, synthetic construct
  source 1..21: mol_type = other DNA
gtttgactaagcttaattgct

SEQ ID NO: 12371-12379 - skipped (9 entries)

SEQ ID NO: 12380 - DNA, 21 bp, synthetic construct
  source 1..21: mol_type = other DNA
gactaagcttaattgctttct

SEQ ID NO: 12381-12389 - skipped (9 entries)

SEQ ID NO: 12390 - DNA, 21 bp, synthetic construct
  source 1..21: mol_type = other DNA
actaagcttaattgctttctg

SEQ ID NO: 12391-12399 - skipped (9 entries)

SEQ ID NO: 12400 - DNA, 21 bp, synthetic construct
  source 1..21: mol_type = other DNA
attgctttctggaacaggatc

SEQ ID NO: 12401-12409 - skipped (9 entries)

SEQ ID NO: 12410 - DNA, 21 bp, synthetic construct
  source 1..21: mol_type = other DNA
ctttctggaacaggatctgaa

SEQ ID NO: 12411-12419 - skipped (9 entries)

SEQ ID NO: 12420 - DNA, 21 bp, synthetic construct
  source 1..21: mol_type = other DNA
ctggaacaggatctgaaactg

SEQ ID NO: 12421-12429 - skipped (9 entries)

SEQ ID NO: 12430 - DNA, 21 bp, synthetic construct
  source 1..21: mol_type = other DNA
tggaacaggatctgaaactgg

SEQ ID NO: 12431-12439 - skipped (9 entries)

SEQ ID NO: 12440 - DNA, 21 bp, synthetic construct
  source 1..21: mol_type = other DNA
tctaatgtccgttaaaggtac

SEQ ID NO: 12441-12449 - skipped (9 entries)

SEQ ID NO: 12450 - DNA, 21 bp, synthetic construct
  source 1..21: mol_type = other DNA
aaggtacgacaccacagagga

SEQ ID NO: 12451-12459 - skipped (9 entries)

SEQ ID NO: 12460 - DNA, 21 bp, synthetic construct
  source 1..21: mol_type = other DNA
tttatacccatcaacactggt

SEQ ID NO: 12461-12469 - skipped (9 entries)

SEQ ID NO: 12470 - DNA, 21 bp, synthetic construct
  source 1..21: mol_type = other DNA
atacccatcaacactggtaag

SEQ ID NO: 12471-12479 - skipped (9 entries)

SEQ ID NO: 12480 - DNA, 21 bp, synthetic construct
  source 1..21: mol_type = other DNA
tacccatcaacactggtaaga

SEQ ID NO: 12481-12489 - skipped (9 entries)

SEQ ID NO: 12490 - DNA, 21 bp, synthetic construct
  source 1..21: mol_type = other DNA
atcagctgaaaaggaaacagc

SEQ ID NO: 12491-12499 - skipped (9 entries)

SEQ ID NO: 12500 - DNA, 21 bp, synthetic construct
  source 1..21: mol_type = other DNA
atgatgctaaactgttcagaa

SEQ ID NO: 12501-12509 - skipped (9 entries)

SEQ ID NO: 12510 - DNA, 21 bp, synthetic construct
  source 1..21: mol_type = other DNA
agaaaacaacaaagaagagac

SEQ ID NO: 12511-12519 - skipped (9 entries)

SEQ ID NO: 12520 - DNA, 21 bp, synthetic construct
  source 1..21: mol_type = other DNA
cttcttttaggatgtggatgt

SEQ ID NO: 12521-12529 - skipped (9 entries)

SEQ ID NO: 12530 - DNA, 21 bp, synthetic construct
  source 1..21: mol_type = other DNA
ttcttttaggatgtggatgta

SEQ ID NO: 12531-12539 - skipped (9 entries)

SEQ ID NO: 12540 - DNA, 21 bp, synthetic construct
  source 1..21: mol_type = other DNA
ttttaggatgtggatgtagaa

SEQ ID NO: 12541-12549 - skipped (9 entries)

SEQ ID NO: 12550 - DNA, 21 bp, synthetic construct
  source 1..21: mol_type = other DNA
taggatgtggatgtagaagag

SEQ ID NO: 12551-12559 - skipped (9 entries)

SEQ ID NO: 12560 - DNA, 21 bp, synthetic construct
  source 1..21: mol_type = other DNA
aggatgtggatgtagaagagg

SEQ ID NO: 12561-12569 - skipped (9 entries)

SEQ ID NO: 12570 - DNA, 21 bp, synthetic construct
  source 1..21: mol_type = other DNA
ggatgtggatgtagaagaggc

SEQ ID NO: 12571-12579 - skipped (9 entries)

SEQ ID NO: 12580 - DNA, 21 bp, synthetic construct
  source 1..21: mol_type = other DNA
tggggcagtatactgaagaac

SEQ ID NO: 12581-12589 - skipped (9 entries)

SEQ ID NO: 12590 - DNA, 21 bp, synthetic construct
  source 1..21: mol_type = other DNA
ttcatcaattggcggggttcc

SEQ ID NO: 12591-12599 - skipped (9 entries)

SEQ ID NO: 12600 - DNA, 21 bp, synthetic construct
  source 1..21: mol_type = other DNA
atcaattggcggggttccatt

SEQ ID NO: 12601-12609 - skipped (9 entries)

SEQ ID NO: 12610 - DNA, 21 bp, synthetic construct
  source 1..21: mol_type = other DNA
gcggggttccatttttccagg

SEQ ID NO: 12611-12619 - skipped (9 entries)

SEQ ID NO: 12620 - DNA, 21 bp, synthetic construct
  source 1..21: mol_type = other DNA
tcccgccttaaatccacagca

SEQ ID NO: 12621-12629 - skipped (9 entries)

SEQ ID NO: 12630 - DNA, 21 bp, synthetic construct
  source 1..21: mol_type = other DNA
cccgccttaaatccacagcat

SEQ ID NO: 12631-12639 - skipped (9 entries)

SEQ ID NO: 12640 - DNA, 21 bp, synthetic construct
  source 1..21: mol_type = other DNA
ccgccttaaatccacagcata

SEQ ID NO: 12641-12649 - skipped (9 entries)

SEQ ID NO: 12650 - DNA, 21 bp, synthetic construct
  source 1..21: mol_type = other DNA
aatccacagcataaaaaatca

SEQ ID NO: 12651-12659 - skipped (9 entries)

SEQ ID NO: 12660 - DNA, 21 bp, synthetic construct
  source 1..21: mol_type = other DNA
acacactggagaggtctaaag

SEQ ID NO: 12661-12669 - skipped (9 entries)

SEQ ID NO: 12670 - DNA, 21 bp, synthetic construct
  source 1..21: mol_type = other DNA
gttacaaagagcagattacct

SEQ ID NO: 12671-12679 - skipped (9 entries)

SEQ ID NO: 12680 - DNA, 21 bp, synthetic construct
  source 1..21: mol_type = other DNA
caaagagcagattacctctgc

SEQ ID NO: 12681-12689 - skipped (9 entries)

SEQ ID NO: 12690 - DNA, 21 bp, synthetic construct
  source 1..21: mol_type = other DNA
cctctgcgagcccagatcaac

SEQ ID NO: 12691-12699 - skipped (9 entries)

SEQ ID NO: 12700 - DNA, 21 bp, synthetic construct
  source 1..21: mol_type = other DNA
tagattttgtgctatcaattt

SEQ ID NO: 12701-12709 - skipped (9 entries)

SEQ ID NO: 12710 - DNA, 21 bp, synthetic construct
  source 1..21: mol_type = other DNA
agttctagattttgtgctatc

SEQ ID NO: 12711-12719 - skipped (9 entries)

SEQ ID NO: 12720 - DNA, 21 bp, synthetic construct
  source 1..21: mol_type = other DNA
attaagttctagattttgtgc

SEQ ID NO: 12721-12729 - skipped (9 entries)

SEQ ID NO: 12730 - DNA, 21 bp, synthetic construct
  source 1..21: mol_type = other DNA
cattaagttctagattttgtg

SEQ ID NO: 12731-12739 - skipped (9 entries)

SEQ ID NO: 12740 - DNA, 21 bp, synthetic construct
  source 1..21: mol_type = other DNA
tggtttcattaagttctagat

SEQ ID NO: 12741-12749 - skipped (9 entries)

SEQ ID NO: 12750 - DNA, 21 bp, synthetic construct
  source 1..21: mol_type = other DNA
atggtttcattaagttctaga

SEQ ID NO: 12751-12759 - skipped (9 entries)

SEQ ID NO: 12760 - DNA, 21 bp, synthetic construct
  source 1..21: mol_type = other DNA
tatggtttcattaagttctag

SEQ ID NO: 12761-12769 - skipped (9 entries)

SEQ ID NO: 12770 - DNA, 21 bp, synthetic construct
  source 1..21: mol_type = other DNA
ttatggtttcattaagttcta

SEQ ID NO: 12771-12779 - skipped (9 entries)

SEQ ID NO: 12780 - DNA, 21 bp, synthetic construct
  source 1..21: mol_type = other DNA
gtcaaaccaatttttatggtt

SEQ ID NO: 12781-12789 - skipped (9 entries)

SEQ ID NO: 12790 - DNA, 21 bp, synthetic construct
  source 1..21: mol_type = other DNA
agcttagtcaaaccaattttt

SEQ ID NO: 12791-12799 - skipped (9 entries)

SEQ ID NO: 12800 - DNA, 21 bp, synthetic construct
  source 1..21: mol_type = other DNA
cagaaagcaattaagcttagt

SEQ ID NO: 12801-12809 - skipped (9 entries)

SEQ ID NO: 12810 - DNA, 21 bp, synthetic construct
  source 1..21: mol_type = other DNA
agatcctgttccagaaagcaa

SEQ ID NO: 12811-12819 - skipped (9 entries)

SEQ ID NO: 12820 - DNA, 21 bp, synthetic construct
  source 1..21: mol_type = other DNA
cagatcctgttccagaaagca

SEQ ID NO: 12821-12829 - skipped (9 entries)

SEQ ID NO: 12830 - DNA, 21 bp, synthetic construct
  source 1..21: mol_type = other DNA
ggatatccagtttcagatcct

SEQ ID NO: 12831-12839 - skipped (9 entries)

SEQ ID NO: 12840 - DNA, 21 bp, synthetic construct
  source 1..21: mol_type = other DNA
aagtacctgttgggatatcca

SEQ ID NO: 12841-12849 - skipped (9 entries)

SEQ ID NO: 12850 - DNA, 21 bp, synthetic construct
  source 1..21: mol_type = other DNA
aaagtacctgttgggatatcc

SEQ ID NO: 12851-12859 - skipped (9 entries)

SEQ ID NO: 12860 - DNA, 21 bp, synthetic construct
  source 1..21: mol_type = other DNA
taaagtacctgttgggatatc

SEQ ID NO: 12861-12869 - skipped (9 entries)

SEQ ID NO: 12870 - DNA, 21 bp, synthetic construct
  source 1..21: mol_type = other DNA
tcttttaaagtacctgttggg

SEQ ID NO: 12871-12879 - skipped (9 entries)

SEQ ID NO: 12880 - DNA, 21 bp, synthetic construct
  source 1..21: mol_type = other DNA
ctcttttaaagtacctgttgg

SEQ ID NO: 12881-12889 - skipped (9 entries)

SEQ ID NO: 12890 - DNA, 21 bp, synthetic construct
  source 1..21: mol_type = other DNA
tatttctcttttaaagtacct

SEQ ID NO: 12891-12899 - skipped (9 entries)

SEQ ID NO: 12900 - DNA, 21 bp, synthetic construct
  source 1..21: mol_type = other DNA
ctctgtggtgtcgtaccttta

SEQ ID NO: 12901-12909 - skipped (9 entries)

SEQ ID NO: 12910 - DNA, 21 bp, synthetic construct
  source 1..21: mol_type = other DNA
cctctgtggtgtcgtaccttt

SEQ ID NO: 12911-12919 - skipped (9 entries)

SEQ ID NO: 12920 - DNA, 21 bp, synthetic construct
  source 1..21: mol_type = other DNA
tcctctgtggtgtcgtacctt

SEQ ID NO: 12921-12929 - skipped (9 entries)

SEQ ID NO: 12930 - DNA, 21 bp, synthetic construct
  source 1..21: mol_type = other DNA
atgggtataaataacttttcc

SEQ ID NO: 12931-12939 - skipped (9 entries)

SEQ ID NO: 12940 - DNA, 21 bp, synthetic construct
  source 1..21: mol_type = other DNA
ccagtgttgatgggtataaat

SEQ ID NO: 12941-12949 - skipped (9 entries)

SEQ ID NO: 12950 - DNA, 21 bp, synthetic construct
  source 1..21: mol_type = other DNA
ttaccagtgttgatgggtata

SEQ ID NO: 12951-12959 - skipped (9 entries)

SEQ ID NO: 12960 - DNA, 21 bp, synthetic construct
  source 1..21: mol_type = other DNA
agttcttaccagtgttgatgg

SEQ ID NO: 12961-12969 - skipped (9 entries)

SEQ ID NO: 12970 - DNA, 21 bp, synthetic construct
  source 1..21: mol_type = other DNA
acgtggttcagttcttaccag

SEQ ID NO: 12971-12979 - skipped (9 entries)

SEQ ID NO: 12980 - DNA, 21 bp, synthetic construct
  source 1..21: mol_type = other DNA
agctgatcaaggagatgttca

SEQ ID NO: 12981-12989 - skipped (9 entries)

SEQ ID NO: 12990 - DNA, 21 bp, synthetic construct
  source 1..21: mol_type = other DNA
cagctgatcaaggagatgttc

SEQ ID NO: 12991-12999 - skipped (9 entries)

SEQ ID NO: 13000 - DNA, 21 bp, synthetic construct
  source 1..21: mol_type = other DNA
tcagctgatcaaggagatgtt

SEQ ID NO: 13001-13009 - skipped (9 entries)

SEQ ID NO: 13010 - DNA, 21 bp, synthetic construct
  source 1..21: mol_type = other DNA
cttttcagctgatcaaggaga

SEQ ID NO: 13011-13019 - skipped (9 entries)

SEQ ID NO: 13020 - DNA, 21 bp, synthetic construct
  source 1..21: mol_type = other DNA
ccttttcagctgatcaaggag

SEQ ID NO: 13021-13029 - skipped (9 entries)

SEQ ID NO: 13030 - DNA, 21 bp, synthetic construct
  source 1..21: mol_type = other DNA
acagctcaggctgtttccttt

SEQ ID NO: 13031-13039 - skipped (9 entries)

SEQ ID NO: 13040 - DNA, 21 bp, synthetic construct
  source 1..21: mol_type = other DNA
gcatcattaacagctcaggct

SEQ ID NO: 13041-13049 - skipped (9 entries)

SEQ ID NO: 13050 - DNA, 21 bp, synthetic construct
  source 1..21: mol_type = other DNA
agcatcattaacagctcaggc

SEQ ID NO: 13051-13059 - skipped (9 entries)

SEQ ID NO: 13060 - DNA, 21 bp, synthetic construct
  source 1..21: mol_type = other DNA
tgaacagtttagcatcattaa

SEQ ID NO: 13061-13069 - skipped (9 entries)

SEQ ID NO: 13070 - DNA, 21 bp, synthetic construct
  source 1..21: mol_type = other DNA
ctgaacagtttagcatcatta

SEQ ID NO: 13071-13079 - skipped (9 entries)

SEQ ID NO: 13080 - DNA, 21 bp, synthetic construct
  source 1..21: mol_type = other DNA
tctgaacagtttagcatcatt

SEQ ID NO: 13081-13089 - skipped (9 entries)

SEQ ID NO: 13090 - DNA, 21 bp, synthetic construct
  source 1..21: mol_type = other DNA
ttttctgaacagtttagcatc

SEQ ID NO: 13091-13099 - skipped (9 entries)

SEQ ID NO: 13100 - DNA, 21 bp, synthetic construct
  source 1..21: mol_type = other DNA
ttgttttctgaacagtttagc

SEQ ID NO: 13101-13109 - skipped (9 entries)

SEQ ID NO: 13110 - DNA, 21 bp, synthetic construct
  source 1..21: mol_type = other DNA
tttgttgttttctgaacagtt

SEQ ID NO: 13111-13119 - skipped (9 entries)

SEQ ID NO: 13120 - DNA, 21 bp, synthetic construct
  source 1..21: mol_type = other DNA
tctcttctttgttgttttctg

SEQ ID NO: 13121-13129 - skipped (9 entries)

SEQ ID NO: 13130 - DNA, 21 bp, synthetic construct
  source 1..21: mol_type = other DNA
ccggaattgtctcttctttgt

SEQ ID NO: 13131-13139 - skipped (9 entries)

SEQ ID NO: 13140 - DNA, 21 bp, synthetic construct
  source 1..21: mol_type = other DNA
accggaattgtctcttctttg

SEQ ID NO: 13141-13149 - skipped (9 entries)

SEQ ID NO: 13150 - DNA, 21 bp, synthetic construct
  source 1..21: mol_type = other DNA
aatttaccggaattgtctctt

SEQ ID NO: 13151-13159 - skipped (9 entries)

SEQ ID NO: 13160 - DNA, 21 bp, synthetic construct
  source 1..21: mol_type = other DNA
aaatttaccggaattgtctct

SEQ ID NO: 13161-13169 - skipped (9 entries)

SEQ ID NO: 13170 - DNA, 21 bp, synthetic construct
  source 1..21: mol_type = other DNA
agtatactgccccagaactgc

SEQ ID NO: 13171-13179 - skipped (9 entries)

SEQ ID NO: 13180 - DNA, 21 bp, synthetic construct
  source 1..21: mol_type = other DNA
ttcagtatactgccccagaac

SEQ ID NO: 13181-13189 - skipped (9 entries)

SEQ ID NO: 13190 - DNA, 21 bp, synthetic construct
  source 1..21: mol_type = other DNA
gaggttcttcagtatactgcc

SEQ ID NO: 13191-13199 - skipped (9 entries)

SEQ ID NO: 13200 - DNA, 21 bp, synthetic construct
  source 1..21: mol_type = other DNA
acttagaggttcttcagtata

SEQ ID NO: 13201-13209 - skipped (9 entries)

SEQ ID NO: 13210 - DNA, 21 bp, synthetic construct
  source 1..21: mol_type = other DNA
atgaacaatccacaccagcat

SEQ ID NO: 13211-13219 - skipped (9 entries)

SEQ ID NO: 13220 - DNA, 21 bp, synthetic construct
  source 1..21: mol_type = other DNA
tctgatatgacatacctggaa

SEQ ID NO: 13221-13229 - skipped (9 entries)

SEQ ID NO: 13230 - DNA, 21 bp, synthetic construct
  source 1..21: mol_type = other DNA
catgtgattttttatgctgtg

SEQ ID NO: 13231-13239 - skipped (9 entries)

SEQ ID NO: 13240 - DNA, 21 bp, synthetic construct
  source 1..21: mol_type = other DNA
ccatgtgattttttatgctgt

SEQ ID NO: 13241-13249 - skipped (9 entries)

SEQ ID NO: 13250 - DNA, 21 bp, synthetic construct
  source 1..21: mol_type = other DNA
tccatgtgattttttatgctg

SEQ ID NO: 13251-13259 - skipped (9 entries)

SEQ ID NO: 13260 - DNA, 21 bp, synthetic construct
  source 1..21: mol_type = other DNA
tcttttccatgtgatttttta

SEQ ID NO: 13261-13269 - skipped (9 entries)

SEQ ID NO: 13270 - DNA, 21 bp, synthetic construct
  source 1..21: mol_type = other DNA
gtcttttccatgtgatttttt

SEQ ID NO: 13271-13279 - skipped (9 entries)

SEQ ID NO: 13280 - DNA, 21 bp, synthetic construct
  source 1..21: mol_type = other DNA
tttgtcttttccatgtgattt

SEQ ID NO: 13281-13289 - skipped (9 entries)

SEQ ID NO: 13290 - DNA, 21 bp, synthetic construct
  source 1..21: mol_type = other DNA
ctttgtcttttccatgtgatt

SEQ ID NO: 13291-13299 - skipped (9 entries)

SEQ ID NO: 13300 - DNA, 21 bp, synthetic construct
  source 1..21: mol_type = other DNA
tctttgtcttttccatgtgat

SEQ ID NO: 13301-13309 - skipped (9 entries)

SEQ ID NO: 13310 - DNA, 21 bp, synthetic construct
  source 1..21: mol_type = other DNA
atgcctctgttttctttgtct

SEQ ID NO: 13311-13319 - skipped (9 entries)

SEQ ID NO: 13320 - DNA, 21 bp, synthetic construct
  source 1..21: mol_type = other DNA
gacctctccagtgtgttaatg

SEQ ID NO: 13321-13329 - skipped (9 entries)

SEQ ID NO: 13330 - DNA, 21 bp, synthetic construct
  source 1..21: mol_type = other DNA
agacctctccagtgtgttaat

SEQ ID NO: 13331-13339 - skipped (9 entries)

SEQ ID NO: 13340 - DNA, 21 bp, synthetic construct
  source 1..21: mol_type = other DNA
cactttagacctctccagtgt

SEQ ID NO: 13341-13349 - skipped (9 entries)

SEQ ID NO: 13350 - DNA, 21 bp, synthetic construct
  source 1..21: mol_type = other DNA
ttccactttagacctctccag

SEQ ID NO: 13351-13359 - skipped (9 entries)

SEQ ID NO: 13360 - DNA, 21 bp, synthetic construct
  source 1..21: mol_type = other DNA
cttccactttagacctctcca

SEQ ID NO: 13361-13369 - skipped (9 entries)

SEQ ID NO: 13370 - DNA, 21 bp, synthetic construct
  source 1..21: mol_type = other DNA
taaccaagtgctctgtagttt

SEQ ID NO: 13371-13379 - skipped (9 entries)

SEQ ID NO: 13380 - DNA, 21 bp, synthetic construct
  source 1..21: mol_type = other DNA
gtaaccaagtgctctgtagtt

SEQ ID NO: 13381-13389 - skipped (9 entries)

SEQ ID NO: 13390 - DNA, 21 bp, synthetic construct
  source 1..21: mol_type = other DNA
atctgggctcgcagaggtaat

SEQ ID NO: 13391-13399 - skipped (9 entries)

SEQ ID NO: 13400 - DNA, 21 bp, synthetic construct
  source 1..21: mol_type = other DNA
aaggttgatctgggctcgcag

SEQ ID NO: 13401-13409 - skipped (9 entries)

SEQ ID NO: 13410 - DNA, 21 bp, synthetic construct
  source 1..21: mol_type = other DNA
ccaacccccaagtgaattaaa

SEQ ID NO: 13411-13419 - skipped (9 entries)

SEQ ID NO: 13420 - DNA, 21 bp, synthetic construct
  source 1..21: mol_type = other DNA
tgcagaccacagtccatgcca

SEQ ID NO: 13421-13429 - skipped (9 entries)

SEQ ID NO: 13430 - DNA, 21 bp, synthetic construct
  source 1..21: mol_type = other DNA
gcagaccacagtccatgccat

SEQ ID NO: 13431-13439 - skipped (9 entries)

SEQ ID NO: 13440 - DNA, 21 bp, synthetic construct
  source 1..21: mol_type = other DNA
cagaccacagtccatgccatc

SEQ ID NO: 13441-13449 - skipped (9 entries)

SEQ ID NO: 13450 - DNA, 21 bp, synthetic construct
  source 1..21: mol_type = other DNA
tcatcttctaggtatgacaac

SEQ ID NO: 13451-13459 - skipped (9 entries)

SEQ ID NO: 13460 - DNA, 21 bp, synthetic construct
  source 1..21: mol_type = other DNA
catcttctaggtatgacaacg

SEQ ID NO: 13461-13469 - skipped (9 entries)

SEQ ID NO: 13470 - DNA, 21 bp, synthetic construct
  source 1..21: mol_type = other DNA
atcttctaggtatgacaacga

SEQ ID NO: 13471-13479 - skipped (9 entries)

SEQ ID NO: 13480 - DNA, 21 bp, synthetic construct
  source 1..21: mol_type = other DNA
taggtatgacaacgaatttgg

SEQ ID NO: 13481-13489 - skipped (9 entries)

SEQ ID NO: 13490 - DNA, 21 bp, synthetic construct
  source 1..21: mol_type = other DNA
cccagctctcataccatgagt

SEQ ID NO: 13491-13499 - skipped (9 entries)

SEQ ID NO: 13500 - DNA, 21 bp, synthetic construct
  source 1..21: mol_type = other DNA
tatccacagtgaatcttggtt

SEQ ID NO: 13501-13509 - skipped (9 entries)

SEQ ID NO: 13510 - DNA, 21 bp, synthetic construct
  source 1..21: mol_type = other DNA
gttgtaaacttgacctaaaga

SEQ ID NO: 13511-13519 - skipped (9 entries)

SEQ ID NO: 13520 - DNA, 21 bp, synthetic construct
  source 1..21: mol_type = other DNA
taaacttgacctaaagaccat

SEQ ID NO: 13521-13529 - skipped (9 entries)

SEQ ID NO: 13530 - DNA, 21 bp, synthetic construct
  source 1..21: mol_type = other DNA
acctaaagaccattgcacttc

SEQ ID NO: 13531-13539 - skipped (9 entries)

SEQ ID NO: 13540 - DNA, 21 bp, synthetic construct
  source 1..21: mol_type = other DNA
cacttcgtgcccgaaacgccg

SEQ ID NO: 13541-13549 - skipped (9 entries)

SEQ ID NO: 13550 - DNA, 21 bp, synthetic construct
  source 1..21: mol_type = other DNA
gtgcccgaaacgccgaatata

SEQ ID NO: 13551-13559 - skipped (9 entries)

SEQ ID NO: 13560 - DNA, 21 bp, synthetic construct
  source 1..21: mol_type = other DNA
tctctgaccattgtagcggtt

SEQ ID NO: 13561-13569 - skipped (9 entries)

SEQ ID NO: 13570 - DNA, 21 bp, synthetic construct
  source 1..21: mol_type = other DNA
tagcggtttgctgcggtaatc

SEQ ID NO: 13571-13579 - skipped (9 entries)

SEQ ID NO: 13580 - DNA, 21 bp, synthetic construct
  source 1..21: mol_type = other DNA
gctgcggtaatcatgaggata

SEQ ID NO: 13581-13589 - skipped (9 entries)

SEQ ID NO: 13590 - DNA, 21 bp, synthetic construct
  source 1..21: mol_type = other DNA
ctgcggtaatcatgaggataa

SEQ ID NO: 13591-13599 - skipped (9 entries)

SEQ ID NO: 13600 - DNA, 21 bp, synthetic construct
  source 1..21: mol_type = other DNA
tcagttctgggaaaatggtgt

SEQ ID NO: 13601-13609 - skipped (9 entries)

SEQ ID NO: 13610 - DNA, 21 bp, synthetic construct
  source 1..21: mol_type = other DNA
cagttctgggaaaatggtgtg

SEQ ID NO: 13611-13619 - skipped (9 entries)

SEQ ID NO: 13620 - DNA, 21 bp, synthetic construct
  source 1..21: mol_type = other DNA
agttctgggaaaatggtgtgc

SEQ ID NO: 13621-13629 - skipped (9 entries)

SEQ ID NO: 13630 - DNA, 21 bp, synthetic construct
  source 1..21: mol_type = other DNA
tgggaaaatggtgtgcacagg

SEQ ID NO: 13631-13639 - skipped (9 entries)

SEQ ID NO: 13640 - DNA, 21 bp, synthetic construct
  source 1..21: mol_type = other DNA
tttcctttccctagtgaagaa

SEQ ID NO: 13641-13649 - skipped (9 entries)

SEQ ID NO: 13650 - DNA, 21 bp, synthetic construct
  source 1..21: mol_type = other DNA
ttcctttccctagtgaagaac

SEQ ID NO: 13651-13659 - skipped (9 entries)

SEQ ID NO: 13660 - DNA, 21 bp, synthetic construct
  source 1..21: mol_type = other DNA
tcctttccctagtgaagaaca

SEQ ID NO: 13661-13669 - skipped (9 entries)

SEQ ID NO: 13670 - DNA, 21 bp, synthetic construct
  source 1..21: mol_type = other DNA
cctttccctagtgaagaacag

SEQ ID NO: 13671-13679 - skipped (9 entries)

SEQ ID NO: 13680 - DNA, 21 bp, synthetic construct
  source 1..21: mol_type = other DNA
ctttccctagtgaagaacagt

SEQ ID NO: 13681-13689 - skipped (9 entries)

SEQ ID NO: 13690 - DNA, 21 bp, synthetic construct
  source 1..21: mol_type = other DNA
ccctagtgaagaacagtccag

SEQ ID NO: 13691-13699 - skipped (9 entries)

SEQ ID NO: 13700 - DNA, 21 bp, synthetic construct
  source 1..21: mol_type = other DNA
cctagtgaagaacagtccaga

SEQ ID NO: 13701-13709 - skipped (9 entries)

SEQ ID NO: 13710 - DNA, 21 bp, synthetic construct
  source 1..21: mol_type = other DNA
tacagaagttgggttttccag

SEQ ID NO: 13711-13719 - skipped (9 entries)

SEQ ID NO: 13720 - DNA, 21 bp, synthetic construct
  source 1..21: mol_type = other DNA
ggttttccagctaagttcttg

SEQ ID NO: 13721-13729 - skipped (9 entries)

SEQ ID NO: 13730 - DNA, 21 bp, synthetic construct
  source 1..21: mol_type = other DNA
tccagctaagttcttggactt

SEQ ID NO: 13731-13739 - skipped (9 entries)

SEQ ID NO: 13740 - DNA, 21 bp, synthetic construct
  source 1..21: mol_type = other DNA
ccagctaagttcttggacttc

SEQ ID NO: 13741-13749 - skipped (9 entries)

SEQ ID NO: 13750 - DNA, 21 bp, synthetic construct
  source 1..21: mol_type = other DNA
cagctaagttcttggacttca

SEQ ID NO: 13751-13759 - skipped (9 entries)

SEQ ID NO: 13760 - DNA, 21 bp, synthetic construct
  source 1..21: mol_type = other DNA
ttggacttcaagattcagaat

SEQ ID NO: 13761-13769 - skipped (9 entries)

SEQ ID NO: 13770 - DNA, 21 bp, synthetic construct
  source 1..21: mol_type = other DNA
gacttcaagattcagaatatg

SEQ ID NO: 13771-13779 - skipped (9 entries)

SEQ ID NO: 13780 - DNA, 21 bp, synthetic construct
  source 1..21: mol_type = other DNA
aagattcagaatatggtgggg

SEQ ID NO: 13781-13789 - skipped (9 entries)

SEQ ID NO: 13790 - DNA, 21 bp, synthetic construct
  source 1..21: mol_type = other DNA
agaatatggtggggagctgtg

SEQ ID NO: 13791-13799 - skipped (9 entries)

SEQ ID NO: 13800 - DNA, 21 bp, synthetic construct
  source 1..21: mol_type = other DNA
cctataaggttagaaggcctt

SEQ ID NO: 13801-13809 - skipped (9 entries)

SEQ ID NO: 13810 - DNA, 21 bp, synthetic construct
  source 1..21: mol_type = other DNA
ctataaggttagaaggccttg

SEQ ID NO: 13811-13819 - skipped (9 entries)

SEQ ID NO: 13820 - DNA, 21 bp, synthetic construct
  source 1..21: mol_type = other DNA
tgctcacccaccaacaattta

SEQ ID NO: 13821-13829 - skipped (9 entries)

SEQ ID NO: 13830 - DNA, 21 bp, synthetic construct
  source 1..21: mol_type = other DNA
ttgcaattttccttctagtta

SEQ ID NO: 13831-13839 - skipped (9 entries)

SEQ ID NO: 13840 - DNA, 21 bp, synthetic construct
  source 1..21: mol_type = other DNA
tgcaattttccttctagttat

SEQ ID NO: 13841-13849 - skipped (9 entries)

SEQ ID NO: 13850 - DNA, 21 bp, synthetic construct
  source 1..21: mol_type = other DNA
gcaattttccttctagttatg

SEQ ID NO: 13851-13859 - skipped (9 entries)

SEQ ID NO: 13860 - DNA, 21 bp, synthetic construct
  source 1..21: mol_type = other DNA
caattttccttctagttatga

SEQ ID NO: 13861-13869 - skipped (9 entries)

SEQ ID NO: 13870 - DNA, 21 bp, synthetic construct
  source 1..21: mol_type = other DNA
tccttctagttatgagccaga

SEQ ID NO: 13871-13879 - skipped (9 entries)

SEQ ID NO: 13880 - DNA, 21 bp, synthetic construct
  source 1..21: mol_type = other DNA
ccttctagttatgagccagag

SEQ ID NO: 13881-13889 - skipped (9 entries)

SEQ ID NO: 13890 - DNA, 21 bp, synthetic construct
  source 1..21: mol_type = other DNA
cttctagttatgagccagagt

SEQ ID NO: 13891-13899 - skipped (9 entries)

SEQ ID NO: 13900 - DNA, 21 bp, synthetic construct
  source 1..21: mol_type = other DNA
tagttatgagccagagttatt

SEQ ID NO: 13901-13909 - skipped (9 entries)

SEQ ID NO: 13910 - DNA, 21 bp, synthetic construct
  source 1..21: mol_type = other DNA
tgagccagagttatttcctgg

SEQ ID NO: 13911-13919 - skipped (9 entries)

SEQ ID NO: 13920 - DNA, 21 bp, synthetic construct
  source 1..21: mol_type = other DNA
cctggtttaatctacagaatg

SEQ ID NO: 13921-13929 - skipped (9 entries)

SEQ ID NO: 13930 - DNA, 21 bp, synthetic construct
  source 1..21: mol_type = other DNA
ctggtttaatctacagaatga

SEQ ID NO: 13931-13939 - skipped (9 entries)

SEQ ID NO: 13940 - DNA, 21 bp, synthetic construct
  source 1..21: mol_type = other DNA
aatctacagaatgatcaaacc

SEQ ID NO: 13941-13949 - skipped (9 entries)

SEQ ID NO: 13950 - DNA, 21 bp, synthetic construct
  source 1..21: mol_type = other DNA
atctacagaatgatcaaaccc

SEQ ID NO: 13951-13959 - skipped (9 entries)

SEQ ID NO: 13960 - DNA, 21 bp, synthetic construct
  source 1..21: mol_type = other DNA
ttctccttatttttgtttctg

SEQ ID NO: 13961-13969 - skipped (9 entries)

SEQ ID NO: 13970 - DNA, 21 bp, synthetic construct
  source 1..21: mol_type = other DNA
tccttatttttgtttctggaa

SEQ ID NO: 13971-13979 - skipped (9 entries)

SEQ ID NO: 13980 - DNA, 21 bp, synthetic construct
  source 1..21: mol_type = other DNA
tttttgtttctggaaaagttg

SEQ ID NO: 13981-13989 - skipped (9 entries)

SEQ ID NO: 13990 - DNA, 21 bp, synthetic construct
  source 1..21: mol_type = other DNA
ttgtttctggaaaagttgtat

SEQ ID NO: 13991-13999 - skipped (9 entries)

SEQ ID NO: 14000 - DNA, 21 bp, synthetic construct
  source 1..21: mol_type = other DNA
tgtttctggaaaagttgtatt

SEQ ID NO: 14001-14009 - skipped (9 entries)

SEQ ID NO: 14010 - DNA, 21 bp, synthetic construct
  source 1..21: mol_type = other DNA
gtttctggaaaagttgtatta

SEQ ID NO: 14011-14019 - skipped (9 entries)

SEQ ID NO: 14020 - DNA, 21 bp, synthetic construct
  source 1..21: mol_type = other DNA
tttctggaaaagttgtattaa

SEQ ID NO: 14021-14029 - skipped (9 entries)

SEQ ID NO: 14030 - DNA, 21 bp, synthetic construct
  source 1..21: mol_type = other DNA
ctggaaaagttgtattaacag

SEQ ID NO: 14031-14039 - skipped (9 entries)

SEQ ID NO: 14040 - DNA, 21 bp, synthetic construct
  source 1..21: mol_type = other DNA
tggaaaagttgtattaacagg

SEQ ID NO: 14041-14049 - skipped (9 entries)

SEQ ID NO: 14050 - DNA, 21 bp, synthetic construct
  source 1..21: mol_type = other DNA
tcttcttaggtgctaaagtca

SEQ ID NO: 14051-14059 - skipped (9 entries)

SEQ ID NO: 14060 - DNA, 21 bp, synthetic construct
  source 1..21: mol_type = other DNA
ttaggtgctaaagtcagagca

SEQ ID NO: 14061-14069 - skipped (9 entries)

SEQ ID NO: 14070 - DNA, 21 bp, synthetic construct
  source 1..21: mol_type = other DNA
ggtgctaaagtcagagcagaa

SEQ ID NO: 14071-14079 - skipped (9 entries)

SEQ ID NO: 14080 - DNA, 21 bp, synthetic construct
  source 1..21: mol_type = other DNA
taaagggattcaggaagacga

SEQ ID NO: 14081-14089 - skipped (9 entries)

SEQ ID NO: 14090 - DNA, 21 bp, synthetic construct
  source 1..21: mol_type = other DNA
ggtcaagtttacaaccaagat

SEQ ID NO: 14091-14099 - skipped (9 entries)

SEQ ID NO: 14100 - DNA, 21 bp, synthetic construct
  source 1..21: mol_type = other DNA
aggtcaagtttacaaccaaga

SEQ ID NO: 14101-14109 - skipped (9 entries)

SEQ ID NO: 14110 - DNA, 21 bp, synthetic construct
  source 1..21: mol_type = other DNA
gggcacgaagtgcaatggtct

SEQ ID NO: 14111-14119 - skipped (9 entries)

SEQ ID NO: 14120 - DNA, 21 bp, synthetic construct
  source 1..21: mol_type = other DNA
cgggcacgaagtgcaatggtc

SEQ ID NO: 14121-14129 - skipped (9 entries)

SEQ ID NO: 14130 - DNA, 21 bp, synthetic construct
  source 1..21: mol_type = other DNA
ggcgtttcgggcacgaagtgc

SEQ ID NO: 14131-14139 - skipped (9 entries)

SEQ ID NO: 14140 - DNA, 21 bp, synthetic construct
  source 1..21: mol_type = other DNA
tattcggcgtttcgggcacga

SEQ ID NO: 14141-14149 - skipped (9 entries)

SEQ ID NO: 14150 - DNA, 21 bp, synthetic construct
  source 1..21: mol_type = other DNA
ggattatattcggcgtttcgg

SEQ ID NO: 14151-14159 - skipped (9 entries)

SEQ ID NO: 14160 - DNA, 21 bp, synthetic construct
  source 1..21: mol_type = other DNA
aaatagatctaaccttgggat

SEQ ID NO: 14161-14169 - skipped (9 entries)

SEQ ID NO: 14170 - DNA, 21 bp, synthetic construct
  source 1..21: mol_type = other DNA
tcctcatgattaccgcagcaa

SEQ ID NO: 14171-14179 - skipped (9 entries)

SEQ ID NO: 14180 - DNA, 21 bp, synthetic construct
  source 1..21: mol_type = other DNA
gtggctctcttatcctcatga

SEQ ID NO: 14181-14189 - skipped (9 entries)

SEQ ID NO: 14190 - DNA, 21 bp, synthetic construct
  source 1..21: mol_type = other DNA
ccagaactgaaaatcagtgcc

SEQ ID NO: 14191-14199 - skipped (9 entries)

SEQ ID NO: 14200 - DNA, 21 bp, synthetic construct
  source 1..21: mol_type = other DNA
cccagaactgaaaatcagtgc

SEQ ID NO: 14201-14209 - skipped (9 entries)

SEQ ID NO: 14210 - DNA, 21 bp, synthetic construct
  source 1..21: mol_type = other DNA
tcccagaactgaaaatcagtg

SEQ ID NO: 14211-14219 - skipped (9 entries)

SEQ ID NO: 14220 - DNA, 21 bp, synthetic construct
  source 1..21: mol_type = other DNA
gctcctgtgcacaccattttc

SEQ ID NO: 14221-14229 - skipped (9 entries)

SEQ ID NO: 14230 - DNA, 21 bp, synthetic construct
  source 1..21: mol_type = other DNA
cggctacctcttggctcctgt

SEQ ID NO: 14231-14239 - skipped (9 entries)

SEQ ID NO: 14240 - DNA, 21 bp, synthetic construct
  source 1..21: mol_type = other DNA
ttacggctacctcttggctcc

SEQ ID NO: 14241-14249 - skipped (9 entries)

SEQ ID NO: 14250 - DNA, 21 bp, synthetic construct
  source 1..21: mol_type = other DNA
cttacggctacctcttggctc

SEQ ID NO: 14251-14259 - skipped (9 entries)

SEQ ID NO: 14260 - DNA, 21 bp, synthetic construct
  source 1..21: mol_type = other DNA
ctgccagtctggactgttctt

SEQ ID NO: 14261-14269 - skipped (9 entries)

SEQ ID NO: 14270 - DNA, 21 bp, synthetic construct
  source 1..21: mol_type = other DNA
ttgctgccagtctggactgtt

SEQ ID NO: 14271-14279 - skipped (9 entries)

SEQ ID NO: 14280 - DNA, 21 bp, synthetic construct
  source 1..21: mol_type = other DNA
cttgctgccagtctggactgt

SEQ ID NO: 14281-14289 - skipped (9 entries)

SEQ ID NO: 14290 - DNA, 21 bp, synthetic construct
  source 1..21: mol_type = other DNA
tcttgctgccagtctggactg

SEQ ID NO: 14291-14299 - skipped (9 entries)

SEQ ID NO: 14300 - DNA, 21 bp, synthetic construct
  source 1..21: mol_type = other DNA
tgtacaactctagcatatttt

SEQ ID NO: 14301-14309 - skipped (9 entries)

SEQ ID NO: 14310 - DNA, 21 bp, synthetic construct
  source 1..21: mol_type = other DNA
gctggaaaacccaacttctgt

SEQ ID NO: 14311-14319 - skipped (9 entries)

SEQ ID NO: 14320 - DNA, 21 bp, synthetic construct
  source 1..21: mol_type = other DNA
aagtccaagaacttagctgga

SEQ ID NO: 14321-14329 - skipped (9 entries)

SEQ ID NO: 14330 - DNA, 21 bp, synthetic construct
  source 1..21: mol_type = other DNA
tgaatcttgaagtccaagaac

SEQ ID NO: 14331-14339 - skipped (9 entries)

SEQ ID NO: 14340 - DNA, 21 bp, synthetic construct
  source 1..21: mol_type = other DNA
acatcacagctccccaccata

SEQ ID NO: 14341-14349 - skipped (9 entries)

SEQ ID NO: 14350 - DNA, 21 bp, synthetic construct
  source 1..21: mol_type = other DNA
taaccttataggaaacttcac

SEQ ID NO: 14351-14359 - skipped (9 entries)

SEQ ID NO: 14360 - DNA, 21 bp, synthetic construct
  source 1..21: mol_type = other DNA
gtgggtgagcacaaggccttc

SEQ ID NO: 14361-14369 - skipped (9 entries)

SEQ ID NO: 14370 - DNA, 21 bp, synthetic construct
  source 1..21: mol_type = other DNA
ttggtgggtgagcacaaggcc

SEQ ID NO: 14371-14379 - skipped (9 entries)

SEQ ID NO: 14380 - DNA, 21 bp, synthetic construct
  source 1..21: mol_type = other DNA
cctactaaattgttggtgggt

SEQ ID NO: 14381-14389 - skipped (9 entries)

SEQ ID NO: 14390 - DNA, 21 bp, synthetic construct
  source 1..21: mol_type = other DNA
agacttacctactaaattgtt

SEQ ID NO: 14391-14399 - skipped (9 entries)

SEQ ID NO: 14400 - DNA, 21 bp, synthetic construct
  source 1..21: mol_type = other DNA
cagacttacctactaaattgt

SEQ ID NO: 14401-14409 - skipped (9 entries)

SEQ ID NO: 14410 - DNA, 21 bp, synthetic construct
  source 1..21: mol_type = other DNA
aaccaggaaataactctggct

SEQ ID NO: 14411-14419 - skipped (9 entries)

SEQ ID NO: 14420 - DNA, 21 bp, synthetic construct
  source 1..21: mol_type = other DNA
tgtagattaaaccaggaaata

SEQ ID NO: 14421-14429 - skipped (9 entries)

SEQ ID NO: 14430 - DNA, 21 bp, synthetic construct
  source 1..21: mol_type = other DNA
atcattctgtagattaaacca

SEQ ID NO: 14431-14439 - skipped (9 entries)

SEQ ID NO: 14440 - DNA, 21 bp, synthetic construct
  source 1..21: mol_type = other DNA
gatcattctgtagattaaacc

SEQ ID NO: 14441-14449 - skipped (9 entries)

SEQ ID NO: 14450 - DNA, 21 bp, synthetic construct
  source 1..21: mol_type = other DNA
tgggtttgatcattctgtaga

SEQ ID NO: 14451-14459 - skipped (9 entries)

SEQ ID NO: 14460 - DNA, 21 bp, synthetic construct
  source 1..21: mol_type = other DNA
cagaaacaaaaataaggagaa

SEQ ID NO: 14461-14469 - skipped (9 entries)

SEQ ID NO: 14470 - DNA, 21 bp, synthetic construct
  source 1..21: mol_type = other DNA
ccagaaacaaaaataaggaga

SEQ ID NO: 14471-14479 - skipped (9 entries)

SEQ ID NO: 14480 - DNA, 21 bp, synthetic construct
  source 1..21: mol_type = other DNA
tccagaaacaaaaataaggag

SEQ ID NO: 14481-14489 - skipped (9 entries)

SEQ ID NO: 14490 - DNA, 21 bp, synthetic construct
  source 1..21: mol_type = other DNA
atacaacttttccagaaacaa

SEQ ID NO: 14491-14499 - skipped (9 entries)

SEQ ID NO: 14500 - DNA, 21 bp, synthetic construct
  source 1..21: mol_type = other DNA
cctgttaatacaacttttcca

SEQ ID NO: 14501-14509 - skipped (9 entries)

SEQ ID NO: 14510 - DNA, 21 bp, synthetic construct
  source 1..21: mol_type = other DNA
caacttacctgttaatacaac

SEQ ID NO: 14511-14519 - skipped (9 entries)

SEQ ID NO: 14520 - DNA, 21 bp, synthetic construct
  source 1..21: mol_type = other DNA
ctgttacaacttacctgttaa

SEQ ID NO: 14521-14529 - skipped (9 entries)

SEQ ID NO: 14530 - DNA, 21 bp, synthetic construct
  source 1..21: mol_type = other DNA
ataaatttctgctctgacttt

SEQ ID NO: 14531-14539 - skipped (9 entries)

SEQ ID NO: 14540 - DNA, 21 bp, synthetic construct
  source 1..21: mol_type = other DNA
aaatgcttcataaatttctgc

SEQ ID NO: 14541-14549 - skipped (9 entries)

SEQ ID NO: 14550 - DNA, 21 bp, synthetic construct
  source 1..21: mol_type = other DNA
caaatgcttcataaatttctg

SEQ ID NO: 14551-14559 - skipped (9 entries)

SEQ ID NO: 14560 - DNA, 21 bp, synthetic construct
  source 1..21: mol_type = other DNA
tcaaatgcttcataaatttct

SEQ ID NO: 14561-14569 - skipped (9 entries)

SEQ ID NO: 14570 - DNA, 21 bp, synthetic construct
  source 1..21: mol_type = other DNA
ctgaatccctttagaataggg

SEQ ID NO: 14571-14579 - skipped (9 entries)

SEQ ID NO: 14580 - DNA, 21 bp, synthetic construct
  source 1..21: mol_type = other DNA
cgtcgtcttcctgaatccctt

SEQ ID NO: 14581-14589 - skipped (9 entries)

SEQ ID NO: 14590 - DNA, 21 bp, synthetic construct
  source 1..21: mol_type = other DNA
gggggctatcattgtagtgag

SEQ ID NO: 14591-14599 - skipped (9 entries)

SEQ ID NO: 14600 - DNA, 21 bp, synthetic construct
  source 1..21: mol_type = other DNA
ggggctatcattgtagtgagt

SEQ ID NO: 14601-14609 - skipped (9 entries)

SEQ ID NO: 14610 - DNA, 21 bp, synthetic construct
  source 1..21: mol_type = other DNA
tagtgagtggcggccctggga

SEQ ID NO: 14611-14619 - skipped (9 entries)

SEQ ID NO: 14620 - DNA, 21 bp, synthetic construct
  source 1..21: mol_type = other DNA
actcccactgggcccaacaac

SEQ ID NO: 14621-14629 - skipped (9 entries)

SEQ ID NO: 14630 - DNA, 21 bp, synthetic construct
  source 1..21: mol_type = other DNA
tgccctgctggacagcagcag

SEQ ID NO: 14631-14639 - skipped (9 entries)

SEQ ID NO: 14640 - DNA, 21 bp, synthetic construct
  source 1..21: mol_type = other DNA
gtccggacccaacccttctac

SEQ ID NO: 14641-14649 - skipped (9 entries)

SEQ ID NO: 14650 - DNA, 21 bp, synthetic construct
  source 1..21: mol_type = other DNA
tacctcctttgagcccatcaa

SEQ ID NO: 14651-14659 - skipped (9 entries)

SEQ ID NO: 14660 - DNA, 21 bp, synthetic construct
  source 1..21: mol_type = other DNA
gagcccatcaaggcagacccc

SEQ ID NO: 14661-14669 - skipped (9 entries)

SEQ ID NO: 14670 - DNA, 21 bp, synthetic construct
  source 1..21: mol_type = other DNA
agcccatcaaggcagacccca

SEQ ID NO: 14671-14679 - skipped (9 entries)

SEQ ID NO: 14680 - DNA, 21 bp, synthetic construct
  source 1..21: mol_type = other DNA
cttgtttttcagttttggaac

SEQ ID NO: 14681-14689 - skipped (9 entries)

SEQ ID NO: 14690 - DNA, 21 bp, synthetic construct
  source 1..21: mol_type = other DNA
tttttcagttttggaactccc

SEQ ID NO: 14691-14699 - skipped (9 entries)

SEQ ID NO: 14700 - DNA, 21 bp, synthetic construct
  source 1..21: mol_type = other DNA
ttcagttttggaactccccaa

SEQ ID NO: 14701-14709 - skipped (9 entries)

SEQ ID NO: 14710 - DNA, 21 bp, synthetic construct
  source 1..21: mol_type = other DNA
tcagttttggaactccccaaa

SEQ ID NO: 14711-14719 - skipped (9 entries)

SEQ ID NO: 14720 - DNA, 21 bp, synthetic construct
  source 1..21: mol_type = other DNA
cagttttggaactccccaaag

SEQ ID NO: 14721-14729 - skipped (9 entries)

SEQ ID NO: 14730 - DNA, 21 bp, synthetic construct
  source 1..21: mol_type = other DNA
agttttggaactccccaaaga

SEQ ID NO: 14731-14739 - skipped (9 entries)

SEQ ID NO: 14740 - DNA, 21 bp, synthetic construct
  source 1..21: mol_type = other DNA
tggaactccccaaagagctgt

SEQ ID NO: 14741-14749 - skipped (9 entries)

SEQ ID NO: 14750 - DNA, 21 bp, synthetic construct
  source 1..21: mol_type = other DNA
ggaactccccaaagagctgtc

SEQ ID NO: 14751-14759 - skipped (9 entries)

SEQ ID NO: 14760 - DNA, 21 bp, synthetic construct
  source 1..21: mol_type = other DNA
ccagagtgcatgagctcggag

SEQ ID NO: 14761-14769 - skipped (9 entries)

SEQ ID NO: 14770 - DNA, 21 bp, synthetic construct
  source 1..21: mol_type = other DNA
gcccctctgcttcgtctttct

SEQ ID NO: 14771-14779 - skipped (9 entries)

SEQ ID NO: 14780 - DNA, 21 bp, synthetic construct
  source 1..21: mol_type = other DNA
cccctctgcttcgtctttctc

SEQ ID NO: 14781-14789 - skipped (9 entries)

SEQ ID NO: 14790 - DNA, 21 bp, synthetic construct
  source 1..21: mol_type = other DNA
gtctttctccacccccgggag

SEQ ID NO: 14791-14799 - skipped (9 entries)

SEQ ID NO: 14800 - DNA, 21 bp, synthetic construct
  source 1..21: mol_type = other DNA
ctccacccccgggagaccacg

SEQ ID NO: 14801-14809 - skipped (9 entries)

SEQ ID NO: 14810 - DNA, 21 bp, synthetic construct
  source 1..21: mol_type = other DNA
tccacccccgggagaccacga

SEQ ID NO: 14811-14819 - skipped (9 entries)

SEQ ID NO: 14820 - DNA, 21 bp, synthetic construct
  source 1..21: mol_type = other DNA
tatctacaacctggacgagag

SEQ ID NO: 14821-14829 - skipped (9 entries)

SEQ ID NO: 14830 - DNA, 21 bp, synthetic construct
  source 1..21: mol_type = other DNA
gatgtgcctgttctcaacctc

SEQ ID NO: 14831-14839 - skipped (9 entries)

SEQ ID NO: 14840 - DNA, 21 bp, synthetic construct
  source 1..21: mol_type = other DNA
atgtgcctgttctcaacctct

SEQ ID NO: 14841-14849 - skipped (9 entries)

SEQ ID NO: 14850 - DNA, 21 bp, synthetic construct
  source 1..21: mol_type = other DNA
tgcactgccagggacagcagt

SEQ ID NO: 14851-14859 - skipped (9 entries)

SEQ ID NO: 14860 - DNA, 21 bp, synthetic construct
  source 1..21: mol_type = other DNA
cctggacttctgcactgccag

SEQ ID NO: 14861-14869 - skipped (9 entries)

SEQ ID NO: 14870 - DNA, 21 bp, synthetic construct
  source 1..21: mol_type = other DNA
ctatcagtcccagggccgcca

SEQ ID NO: 14871-14879 - skipped (9 entries)

SEQ ID NO: 14880 - DNA, 21 bp, synthetic construct
  source 1..21: mol_type = other DNA
ggcccagtgggagtgaactga

SEQ ID NO: 14881-14889 - skipped (9 entries)

SEQ ID NO: 14890 - DNA, 21 bp, synthetic construct
  source 1..21: mol_type = other DNA
ttgggcccagtgggagtgaac

SEQ ID NO: 14891-14899 - skipped (9 entries)

SEQ ID NO: 14900 - DNA, 21 bp, synthetic construct
  source 1..21: mol_type = other DNA
ggtccggacgaactgctgctg

SEQ ID NO: 14901-14909 - skipped (9 entries)

SEQ ID NO: 14910 - DNA, 21 bp, synthetic construct
  source 1..21: mol_type = other DNA
atgggctcaaaggaggtagaa

SEQ ID NO: 14911-14919 - skipped (9 entries)

SEQ ID NO: 14920 - DNA, 21 bp, synthetic construct
  source 1..21: mol_type = other DNA
tgacagctctttggggagttc

SEQ ID NO: 14921-14929 - skipped (9 entries)

SEQ ID NO: 14930 - DNA, 21 bp, synthetic construct
  source 1..21: mol_type = other DNA
ctgacagctctttggggagtt

SEQ ID NO: 14931-14939 - skipped (9 entries)

SEQ ID NO: 14940 - DNA, 21 bp, synthetic construct
  source 1..21: mol_type = other DNA
tgaggacatcaactcctccag

SEQ ID NO: 14941-14949 - skipped (9 entries)

SEQ ID NO: 14950 - DNA, 21 bp, synthetic construct
  source 1..21: mol_type = other DNA
cagggccacccaccttctgag

SEQ ID NO: 14951-14959 - skipped (9 entries)

SEQ ID NO: 14960 - DNA, 21 bp, synthetic construct
  source 1..21: mol_type = other DNA
tagatataatcgtggtctccc

SEQ ID NO: 14961-14969 - skipped (9 entries)

SEQ ID NO: 14970 - DNA, 21 bp, synthetic construct
  source 1..21: mol_type = other DNA
actctcgtccaggttgtagat

SEQ ID NO: 14971-14979 - skipped (9 entries)

SEQ ID NO: 14980 - DNA, 21 bp, synthetic construct
  source 1..21: mol_type = other DNA
tgggggttcacccacttgtag

SEQ ID NO: 14981-14989 - skipped (9 entries)

SEQ ID NO: 14990 - DNA, 21 bp, synthetic construct
  source 1..21: mol_type = other DNA
acccacttgtaggtgccctca

SEQ ID NO: 14991-14999 - skipped (9 entries)

SEQ ID NO: 15000 - DNA, 21 bp, synthetic construct
  source 1..21: mol_type = other DNA
taggtgccctcatactggaaa

SEQ ID NO: 15001-15009 - skipped (9 entries)

SEQ ID NO: 15010 - DNA, 21 bp, synthetic construct
  source 1..21: mol_type = other DNA
atcagctcgtctgcctccgtg

SEQ ID NO: 15011-15019 - skipped (9 entries)

SEQ ID NO: 15020 - DNA, 21 bp, synthetic construct
  source 1..21: mol_type = other DNA
cctcacctgccataaatatag

SEQ ID NO: 15021-15029 - skipped (9 entries)

SEQ ID NO: 15030 - DNA, 21 bp, synthetic construct
  source 1..21: mol_type = other DNA
ctcacctgccataaatatagg

SEQ ID NO: 15031-15039 - skipped (9 entries)

SEQ ID NO: 15040 - DNA, 21 bp, synthetic construct
  source 1..21: mol_type = other DNA
ggcttctccagctcaatctgg

SEQ ID NO: 15041-15049 - skipped (9 entries)

SEQ ID NO: 15050 - DNA, 21 bp, synthetic construct
  source 1..21: mol_type = other DNA
tccagctcaatctggtgcagc

SEQ ID NO: 15051-15059 - skipped (9 entries)

SEQ ID NO: 15060 - DNA, 21 bp, synthetic construct
  source 1..21: mol_type = other DNA
tctgtagggcaccttgtatct

SEQ ID NO: 15061-15069 - skipped (9 entries)

SEQ ID NO: 15070 - DNA, 21 bp, synthetic construct
  source 1..21: mol_type = other DNA
tatctgttgccgtaggtcagg

SEQ ID NO: 15071-15079 - skipped (9 entries)

SEQ ID NO: 15080 - DNA, 21 bp, synthetic construct
  source 1..21: mol_type = other DNA
ccgtaggtcaggtccagctcc

SEQ ID NO: 15081-15089 - skipped (9 entries)

SEQ ID NO: 15090 - DNA, 21 bp, synthetic construct
  source 1..21: mol_type = other DNA
aagaacatgcccggcttcttg

SEQ ID NO: 15091-15099 - skipped (9 entries)

SEQ ID NO: 15100 - DNA, 21 bp, synthetic construct
  source 1..21: mol_type = other DNA
ttggtcatcatcttggtgtac

SEQ ID NO: 15101-15109 - skipped (9 entries)

SEQ ID NO: 15110 - DNA, 21 bp, synthetic construct
  source 1..21: mol_type = other DNA
gtcatcatcttggtgtacacg

SEQ ID NO: 15111-15119 - skipped (9 entries)

SEQ ID NO: 15120 - DNA, 21 bp, synthetic construct
  source 1..21: mol_type = other DNA
gtgtacacggcctcgttgggc

SEQ ID NO: 15121-15129 - skipped (9 entries)

SEQ ID NO: 15130 - DNA, 21 bp, synthetic construct
  source 1..21: mol_type = other DNA
ggctgcacgcggatcaccagc

SEQ ID NO: 15131-15139 - skipped (9 entries)

SEQ ID NO: 15140 - DNA, 21 bp, synthetic construct
  source 1..21: mol_type = other DNA
cgcttgcactgctggtggaag

SEQ ID NO: 15141-15149 - skipped (9 entries)

SEQ ID NO: 15150 - DNA, 21 bp, synthetic construct
  source 1..21: mol_type = other DNA
cactgctggtggaagatgtcg

SEQ ID NO: 15151-15159 - skipped (9 entries)

SEQ ID NO: 15160 - DNA, 21 bp, synthetic construct
  source 1..21: mol_type = other DNA
cgctcgttcagggccttgccg

SEQ ID NO: 15161-15169 - skipped (9 entries)

SEQ ID NO: 15170 - DNA, 21 bp, synthetic construct
  source 1..21: mol_type = other DNA
agggccttgccgcagcgcagg

SEQ ID NO: 15171-15179 - skipped (9 entries)

SEQ ID NO: 15180 - DNA, 21 bp, synthetic construct
  source 1..21: mol_type = other DNA
ccgcagcgcaggatgaagggc

SEQ ID NO: 15181-15189 - skipped (9 entries)

SEQ ID NO: 15190 - DNA, 21 bp, synthetic construct
  source 1..21: mol_type = other DNA
cagtatgagggcacctacaag

SEQ ID NO: 15191-15199 - skipped (9 entries)

SEQ ID NO: 15200 - DNA, 21 bp, synthetic construct
  source 1..21: mol_type = other DNA
ccagtatgagggcacctacaa

SEQ ID NO: 15201-15209 - skipped (9 entries)

SEQ ID NO: 15210 - DNA, 21 bp, synthetic construct
  source 1..21: mol_type = other DNA
agctggagaagcccaagccca

SEQ ID NO: 15211-15219 - skipped (9 entries)

SEQ ID NO: 15220 - DNA, 21 bp, synthetic construct
  source 1..21: mol_type = other DNA
accccactgctgcaccagatt

SEQ ID NO: 15221-15229 - skipped (9 entries)

SEQ ID NO: 15230 - DNA, 21 bp, synthetic construct
  source 1..21: mol_type = other DNA
caccccactgctgcaccagat

SEQ ID NO: 15231-15239 - skipped (9 entries)

SEQ ID NO: 15240 - DNA, 21 bp, synthetic construct
  source 1..21: mol_type = other DNA
tcaccccactgctgcaccaga

SEQ ID NO: 15241-15249 - skipped (9 entries)

SEQ ID NO: 15250 - DNA, 21 bp, synthetic construct
  source 1..21: mol_type = other DNA
tgcgggagccagatgcacttc

SEQ ID NO: 15251-15259 - skipped (9 entries)

SEQ ID NO: 15260 - DNA, 21 bp, synthetic construct
  source 1..21: mol_type = other DNA
aaccccgaggagtcggagctg

SEQ ID NO: 15261-15269 - skipped (9 entries)

SEQ ID NO: 15270 - DNA, 21 bp, synthetic construct
  source 1..21: mol_type = other DNA
ttcaaccccgaggagtcggag

SEQ ID NO: 15271-15279 - skipped (9 entries)

SEQ ID NO: 15280 - DNA, 21 bp, synthetic construct
  source 1..21: mol_type = other DNA
caccagcagtgcaagcgcaac

SEQ ID NO: 15281-15289 - skipped (9 entries)

SEQ ID NO: 15290 - DNA, 21 bp, synthetic construct
  source 1..21: mol_type = other DNA
catgatgtggccggcgacatc

SEQ ID NO: 15291-15299 - skipped (9 entries)

SEQ ID NO: 15300 - DNA, 21 bp, synthetic construct
  source 1..21: mol_type = other DNA
atcctgcgctgcggcaaggcc

SEQ ID NO: 15301-15309 - skipped (9 entries)

SEQ ID NO: 15310 - DNA, 21 bp, synthetic construct
  source 1..21: mol_type = other DNA
cgccacgtaggggtgcccttc

SEQ ID NO: 15311-15319 - skipped (9 entries)

SEQ ID NO: 15320 - DNA, 21 bp, synthetic construct
  source 1..21: mol_type = other DNA
ccgccacgtaggggtgccctt

SEQ ID NO: 15321-15329 - skipped (9 entries)

SEQ ID NO: 15330 - DNA, 21 bp, synthetic construct
  source 1..21: mol_type = other DNA
atgaagataaattgatagcac

SEQ ID NO: 15331-15339 - skipped (9 entries)

SEQ ID NO: 15340 - DNA, 21 bp, synthetic construct
  source 1..21: mol_type = other DNA
atagcacaaaatctagaactt

SEQ ID NO: 15341-15349 - skipped (9 entries)

SEQ ID NO: 15350 - DNA, 21 bp, synthetic construct
  source 1..21: mol_type = other DNA
atgaaaccataaaaattggtt

SEQ ID NO: 15351-15359 - skipped (9 entries)

SEQ ID NO: 15360 - DNA, 21 bp, synthetic construct
  source 1..21: mol_type = other DNA
gtttgactaagcttaattgct

SEQ ID NO: 15361-15369 - skipped (9 entries)

SEQ ID NO: 15370 - DNA, 21 bp, synthetic construct
  source 1..21: mol_type = other DNA
gactaagcttaattgctttct

SEQ ID NO: 15371-15379 - skipped (9 entries)

SEQ ID NO: 15380 - DNA, 21 bp, synthetic construct
  source 1..21: mol_type = other DNA
actaagcttaattgctttctg

SEQ ID NO: 15381-15389 - skipped (9 entries)

SEQ ID NO: 15390 - DNA, 21 bp, synthetic construct
  source 1..21: mol_type = other DNA
attgctttctggaacaggatc

SEQ ID NO: 15391-15399 - skipped (9 entries)

SEQ ID NO: 15400 - DNA, 21 bp, synthetic construct
  source 1..21: mol_type = other DNA
ctttctggaacaggatctgaa

SEQ ID NO: 15401-15409 - skipped (9 entries)

SEQ ID NO: 15410 - DNA, 21 bp, synthetic construct
  source 1..21: mol_type = other DNA
ctggaacaggatctgaaactg

SEQ ID NO: 15411-15419 - skipped (9 entries)

SEQ ID NO: 15420 - DNA, 21 bp, synthetic construct
  source 1..21: mol_type = other DNA
tggaacaggatctgaaactgg

SEQ ID NO: 15421-15429 - skipped (9 entries)

SEQ ID NO: 15430 - DNA, 21 bp, synthetic construct
  source 1..21: mol_type = other DNA
tctaatgtccgttaaaggtac

SEQ ID NO: 15431-15439 - skipped (9 entries)

SEQ ID NO: 15440 - DNA, 21 bp, synthetic construct
  source 1..21: mol_type = other DNA
aaggtacgacaccacagagga

SEQ ID NO: 15441-15449 - skipped (9 entries)

SEQ ID NO: 15450 - DNA, 21 bp, synthetic construct
  source 1..21: mol_type = other DNA
tttatacccatcaacactggt

SEQ ID NO: 15451-15459 - skipped (9 entries)

SEQ ID NO: 15460 - DNA, 21 bp, synthetic construct
  source 1..21: mol_type = other DNA
atacccatcaacactggtaag

SEQ ID NO: 15461-15469 - skipped (9 entries)

SEQ ID NO: 15470 - DNA, 21 bp, synthetic construct
  source 1..21: mol_type = other DNA
tacccatcaacactggtaaga

SEQ ID NO: 15471-15479 - skipped (9 entries)

SEQ ID NO: 15480 - DNA, 21 bp, synthetic construct
  source 1..21: mol_type = other DNA
atcagctgaaaaggaaacagc

SEQ ID NO: 15481-15489 - skipped (9 entries)

SEQ ID NO: 15490 - DNA, 21 bp, synthetic construct
  source 1..21: mol_type = other DNA
atgatgctaaactgttcagaa

SEQ ID NO: 15491-15499 - skipped (9 entries)

SEQ ID NO: 15500 - DNA, 21 bp, synthetic construct
  source 1..21: mol_type = other DNA
agaaaacaacaaagaagagac

SEQ ID NO: 15501-15509 - skipped (9 entries)

SEQ ID NO: 15510 - DNA, 21 bp, synthetic construct
  source 1..21: mol_type = other DNA
cttcttttaggatgtggatgt

SEQ ID NO: 15511-15519 - skipped (9 entries)

SEQ ID NO: 15520 - DNA, 21 bp, synthetic construct
  source 1..21: mol_type = other DNA
ttcttttaggatgtggatgta

SEQ ID NO: 15521-15529 - skipped (9 entries)

SEQ ID NO: 15530 - DNA, 21 bp, synthetic construct
  source 1..21: mol_type = other DNA
ttttaggatgtggatgtagaa

SEQ ID NO: 15531-15539 - skipped (9 entries)

SEQ ID NO: 15540 - DNA, 21 bp, synthetic construct
  source 1..21: mol_type = other DNA
taggatgtggatgtagaagag

SEQ ID NO: 15541-15549 - skipped (9 entries)

SEQ ID NO: 15550 - DNA, 21 bp, synthetic construct
  source 1..21: mol_type = other DNA
aggatgtggatgtagaagagg

SEQ ID NO: 15551-15559 - skipped (9 entries)

SEQ ID NO: 15560 - DNA, 21 bp, synthetic construct
  source 1..21: mol_type = other DNA
ggatgtggatgtagaagaggc

SEQ ID NO: 15561-15569 - skipped (9 entries)

SEQ ID NO: 15570 - DNA, 21 bp, synthetic construct
  source 1..21: mol_type = other DNA
tggggcagtatactgaagaac

SEQ ID NO: 15571-15579 - skipped (9 entries)

SEQ ID NO: 15580 - DNA, 21 bp, synthetic construct
  source 1..21: mol_type = other DNA
ttcatcaattggcggggttcc

SEQ ID NO: 15581-15589 - skipped (9 entries)

SEQ ID NO: 15590 - DNA, 21 bp, synthetic construct
  source 1..21: mol_type = other DNA
atcaattggcggggttccatt

SEQ ID NO: 15591-15599 - skipped (9 entries)

SEQ ID NO: 15600 - DNA, 21 bp, synthetic construct
  source 1..21: mol_type = other DNA
gcggggttccatttttccagg

SEQ ID NO: 15601-15609 - skipped (9 entries)

SEQ ID NO: 15610 - DNA, 21 bp, synthetic construct
  source 1..21: mol_type = other DNA
tcccgccttaaatccacagca

SEQ ID NO: 15611-15619 - skipped (9 entries)

SEQ ID NO: 15620 - DNA, 21 bp, synthetic construct
  source 1..21: mol_type = other DNA
cccgccttaaatccacagcat

SEQ ID NO: 15621-15629 - skipped (9 entries)

SEQ ID NO: 15630 - DNA, 21 bp, synthetic construct
  source 1..21: mol_type = other DNA
ccgccttaaatccacagcata

SEQ ID NO: 15631-15639 - skipped (9 entries)

SEQ ID NO: 15640 - DNA, 21 bp, synthetic construct
  source 1..21: mol_type = other DNA
aatccacagcataaaaaatca

SEQ ID NO: 15641-15649 - skipped (9 entries)

SEQ ID NO: 15650 - DNA, 21 bp, synthetic construct
  source 1..21: mol_type = other DNA
acacactggagaggtctaaag

SEQ ID NO: 15651-15659 - skipped (9 entries)

SEQ ID NO: 15660 - DNA, 21 bp, synthetic construct
  source 1..21: mol_type = other DNA
gttacaaagagcagattacct

SEQ ID NO: 15661-15669 - skipped (9 entries)

SEQ ID NO: 15670 - DNA, 21 bp, synthetic construct
  source 1..21: mol_type = other DNA
caaagagcagattacctctgc

SEQ ID NO: 15671-15679 - skipped (9 entries)

SEQ ID NO: 15680 - DNA, 21 bp, synthetic construct
  source 1..21: mol_type = other DNA
cctctgcgagcccagatcaac

SEQ ID NO: 15681-15689 - skipped (9 entries)

SEQ ID NO: 15690 - DNA, 21 bp, synthetic construct
  source 1..21: mol_type = other DNA
tagattttgtgctatcaattt

SEQ ID NO: 15691-15699 - skipped (9 entries)

SEQ ID NO: 15700 - DNA, 21 bp, synthetic construct
  source 1..21: mol_type = other DNA
agttctagattttgtgctatc

SEQ ID NO: 15701-15709 - skipped (9 entries)

SEQ ID NO: 15710 - DNA, 21 bp, synthetic construct
  source 1..21: mol_type = other DNA
attaagttctagattttgtgc

SEQ ID NO: 15711-15719 - skipped (9 entries)

SEQ ID NO: 15720 - DNA, 21 bp, synthetic construct
  source 1..21: mol_type = other DNA
cattaagttctagattttgtg

SEQ ID NO: 15721-15729 - skipped (9 entries)

SEQ ID NO: 15730 - DNA, 21 bp, synthetic construct
  source 1..21: mol_type = other DNA
tggtttcattaagttctagat

SEQ ID NO: 15731-15739 - skipped (9 entries)

SEQ ID NO: 15740 - DNA, 21 bp, synthetic construct
  source 1..21: mol_type = other DNA
atggtttcattaagttctaga

SEQ ID NO: 15741-15749 - skipped (9 entries)

SEQ ID NO: 15750 - DNA, 21 bp, synthetic construct
  source 1..21: mol_type = other DNA
tatggtttcattaagttctag

SEQ ID NO: 15751-15759 - skipped (9 entries)

SEQ ID NO: 15760 - DNA, 21 bp, synthetic construct
  source 1..21: mol_type = other DNA
ttatggtttcattaagttcta

SEQ ID NO: 15761-15769 - skipped (9 entries)

SEQ ID NO: 15770 - DNA, 21 bp, synthetic construct
  source 1..21: mol_type = other DNA
gtcaaaccaatttttatggtt

SEQ ID NO: 15771-15779 - skipped (9 entries)

SEQ ID NO: 15780 - DNA, 21 bp, synthetic construct
  source 1..21: mol_type = other DNA
agcttagtcaaaccaattttt

SEQ ID NO: 15781-15789 - skipped (9 entries)

SEQ ID NO: 15790 - DNA, 21 bp, synthetic construct
  source 1..21: mol_type = other DNA
cagaaagcaattaagcttagt

SEQ ID NO: 15791-15799 - skipped (9 entries)

SEQ ID NO: 15800 - DNA, 21 bp, synthetic construct
  source 1..21: mol_type = other DNA
agatcctgttccagaaagcaa

SEQ ID NO: 15801-15809 - skipped (9 entries)

SEQ ID NO: 15810 - DNA, 21 bp, synthetic construct
  source 1..21: mol_type = other DNA
cagatcctgttccagaaagca

SEQ ID NO: 15811-15819 - skipped (9 entries)

SEQ ID NO: 15820 - DNA, 21 bp, synthetic construct
  source 1..21: mol_type = other DNA
ggatatccagtttcagatcct

SEQ ID NO: 15821-15829 - skipped (9 entries)

SEQ ID NO: 15830 - DNA, 21 bp, synthetic construct
  source 1..21: mol_type = other DNA
aagtacctgttgggatatcca

SEQ ID NO: 15831-15839 - skipped (9 entries)

SEQ ID NO: 15840 - DNA, 21 bp, synthetic construct
  source 1..21: mol_type = other DNA
aaagtacctgttgggatatcc

SEQ ID NO: 15841-15849 - skipped (9 entries)

SEQ ID NO: 15850 - DNA, 21 bp, synthetic construct
  source 1..21: mol_type = other DNA
taaagtacctgttgggatatc

SEQ ID NO: 15851-15859 - skipped (9 entries)

SEQ ID NO: 15860 - DNA, 21 bp, synthetic construct
  source 1..21: mol_type = other DNA
tcttttaaagtacctgttggg

SEQ ID NO: 15861-15869 - skipped (9 entries)

SEQ ID NO: 15870 - DNA, 21 bp, synthetic construct
  source 1..21: mol_type = other DNA
ctcttttaaagtacctgttgg

SEQ ID NO: 15871-15879 - skipped (9 entries)

SEQ ID NO: 15880 - DNA, 21 bp, synthetic construct
  source 1..21: mol_type = other DNA
tatttctcttttaaagtacct

SEQ ID NO: 15881-15889 - skipped (9 entries)

SEQ ID NO: 15890 - DNA, 21 bp, synthetic construct
  source 1..21: mol_type = other DNA
atgggtataaataacttttcc

SEQ ID NO: 15891-15899 - skipped (9 entries)

SEQ ID NO: 15900 - DNA, 21 bp, synthetic construct
  source 1..21: mol_type = other DNA
ccagtgttgatgggtataaat

SEQ ID NO: 15901-15909 - skipped (9 entries)

SEQ ID NO: 15910 - DNA, 21 bp, synthetic construct
  source 1..21: mol_type = other DNA
ttaccagtgttgatgggtata

SEQ ID NO: 15911-15919 - skipped (9 entries)

SEQ ID NO: 15920 - DNA, 21 bp, synthetic construct
  source 1..21: mol_type = other DNA
agttcttaccagtgttgatgg

SEQ ID NO: 15921-15929 - skipped (9 entries)

SEQ ID NO: 15930 - DNA, 21 bp, synthetic construct
  source 1..21: mol_type = other DNA
acgtggttcagttcttaccag

SEQ ID NO: 15931-15939 - skipped (9 entries)

SEQ ID NO: 15940 - DNA, 21 bp, synthetic construct
  source 1..21: mol_type = other DNA
agctgatcaaggagatgttca

SEQ ID NO: 15941-15949 - skipped (9 entries)

SEQ ID NO: 15950 - DNA, 21 bp, synthetic construct
  source 1..21: mol_type = other DNA
cagctgatcaaggagatgttc

SEQ ID NO: 15951-15959 - skipped (9 entries)

SEQ ID NO: 15960 - DNA, 21 bp, synthetic construct
  source 1..21: mol_type = other DNA
tcagctgatcaaggagatgtt

SEQ ID NO: 15961-15969 - skipped (9 entries)

SEQ ID NO: 15970 - DNA, 21 bp, synthetic construct
  source 1..21: mol_type = other DNA
cttttcagctgatcaaggaga

SEQ ID NO: 15971-15979 - skipped (9 entries)

SEQ ID NO: 15980 - DNA, 21 bp, synthetic construct
  source 1..21: mol_type = other DNA
ccttttcagctgatcaaggag

SEQ ID NO: 15981-15989 - skipped (9 entries)

SEQ ID NO: 15990 - DNA, 21 bp, synthetic construct
  source 1..21: mol_type = other DNA
acagctcaggctgtttccttt

SEQ ID NO: 15991-15999 - skipped (9 entries)

SEQ ID NO: 16000 - DNA, 21 bp, synthetic construct
  source 1..21: mol_type = other DNA
gcatcattaacagctcaggct

SEQ ID NO: 16001-16009 - skipped (9 entries)

SEQ ID NO: 16010 - DNA, 21 bp, synthetic construct
  source 1..21: mol_type = other DNA
agcatcattaacagctcaggc

SEQ ID NO: 16011-16019 - skipped (9 entries)

SEQ ID NO: 16020 - DNA, 21 bp, synthetic construct
  source 1..21: mol_type = other DNA
tgaacagtttagcatcattaa

SEQ ID NO: 16021-16029 - skipped (9 entries)

SEQ ID NO: 16030 - DNA, 21 bp, synthetic construct
  source 1..21: mol_type = other DNA
ctgaacagtttagcatcatta

SEQ ID NO: 16031-16039 - skipped (9 entries)

SEQ ID NO: 16040 - DNA, 21 bp, synthetic construct
  source 1..21: mol_type = other DNA
tctgaacagtttagcatcatt

SEQ ID NO: 16041-16049 - skipped (9 entries)

SEQ ID NO: 16050 - DNA, 21 bp, synthetic construct
  source 1..21: mol_type = other DNA
ttttctgaacagtttagcatc

SEQ ID NO: 16051-16059 - skipped (9 entries)

SEQ ID NO: 16060 - DNA, 21 bp, synthetic construct
  source 1..21: mol_type = other DNA
ttgttttctgaacagtttagc

SEQ ID NO: 16061-16069 - skipped (9 entries)

SEQ ID NO: 16070 - DNA, 21 bp, synthetic construct
  source 1..21: mol_type = other DNA
tttgttgttttctgaacagtt

SEQ ID NO: 16071-16079 - skipped (9 entries)

SEQ ID NO: 16080 - DNA, 21 bp, synthetic construct
  source 1..21: mol_type = other DNA
tctcttctttgttgttttctg

SEQ ID NO: 16081-16089 - skipped (9 entries)

SEQ ID NO: 16090 - DNA, 21 bp, synthetic construct
  source 1..21: mol_type = other DNA
ccggaattgtctcttctttgt

SEQ ID NO: 16091-16099 - skipped (9 entries)

SEQ ID NO: 16100 - DNA, 21 bp, synthetic construct
  source 1..21: mol_type = other DNA
accggaattgtctcttctttg

SEQ ID NO: 16101-16109 - skipped (9 entries)

SEQ ID NO: 16110 - DNA, 21 bp, synthetic construct
  source 1..21: mol_type = other DNA
aatttaccggaattgtctctt

SEQ ID NO: 16111-16119 - skipped (9 entries)

SEQ ID NO: 16120 - DNA, 21 bp, synthetic construct
  source 1..21: mol_type = other DNA
aaatttaccggaattgtctct

SEQ ID NO: 16121-16129 - skipped (9 entries)

SEQ ID NO: 16130 - DNA, 21 bp, synthetic construct
  source 1..21: mol_type = other DNA
agtatactgccccagaactgc

SEQ ID NO: 16131-16139 - skipped (9 entries)

SEQ ID NO: 16140 - DNA, 21 bp, synthetic construct
  source 1..21: mol_type = other DNA
ttcagtatactgccccagaac

SEQ ID NO: 16141-16149 - skipped (9 entries)

SEQ ID NO: 16150 - DNA, 21 bp, synthetic construct
  source 1..21: mol_type = other DNA
gaggttcttcagtatactgcc

SEQ ID NO: 16151-16159 - skipped (9 entries)

SEQ ID NO: 16160 - DNA, 21 bp, synthetic construct
  source 1..21: mol_type = other DNA
acttagaggttcttcagtata

SEQ ID NO: 16161-16169 - skipped (9 entries)

SEQ ID NO: 16170 - DNA, 21 bp, synthetic construct
  source 1..21: mol_type = other DNA
atgaacaatccacaccagcat

SEQ ID NO: 16171-16179 - skipped (9 entries)

SEQ ID NO: 16180 - DNA, 21 bp, synthetic construct
  source 1..21: mol_type = other DNA
tctgatatgacatacctggaa

SEQ ID NO: 16181-16189 - skipped (9 entries)

SEQ ID NO: 16190 - DNA, 21 bp, synthetic construct
  source 1..21: mol_type = other DNA
tcttttccatgtgatttttta

SEQ ID NO: 16191-16199 - skipped (9 entries)

SEQ ID NO: 16200 - DNA, 21 bp, synthetic construct
  source 1..21: mol_type = other DNA
gtcttttccatgtgatttttt

SEQ ID NO: 16201-16209 - skipped (9 entries)

SEQ ID NO: 16210 - DNA, 21 bp, synthetic construct
  source 1..21: mol_type = other DNA
tttgtcttttccatgtgattt

SEQ ID NO: 16211-16219 - skipped (9 entries)

SEQ ID NO: 16220 - DNA, 21 bp, synthetic construct
  source 1..21: mol_type = other DNA
ctttgtcttttccatgtgatt

SEQ ID NO: 16221-16229 - skipped (9 entries)

SEQ ID NO: 16230 - DNA, 21 bp, synthetic construct
  source 1..21: mol_type = other DNA
tctttgtcttttccatgtgat

SEQ ID NO: 16231-16239 - skipped (9 entries)

SEQ ID NO: 16240 - DNA, 21 bp, synthetic construct
  source 1..21: mol_type = other DNA
atgcctctgttttctttgtct

SEQ ID NO: 16241-16249 - skipped (9 entries)

SEQ ID NO: 16250 - DNA, 21 bp, synthetic construct
  source 1..21: mol_type = other DNA
gacctctccagtgtgttaatg

SEQ ID NO: 16251-16259 - skipped (9 entries)

SEQ ID NO: 16260 - DNA, 21 bp, synthetic construct
  source 1..21: mol_type = other DNA
agacctctccagtgtgttaat

SEQ ID NO: 16261-16269 - skipped (9 entries)

SEQ ID NO: 16270 - DNA, 21 bp, synthetic construct
  source 1..21: mol_type = other DNA
cactttagacctctccagtgt

SEQ ID NO: 16271-16279 - skipped (9 entries)

SEQ ID NO: 16280 - DNA, 21 bp, synthetic construct
  source 1..21: mol_type = other DNA
ttccactttagacctctccag

SEQ ID NO: 16281-16289 - skipped (9 entries)

SEQ ID NO: 16290 - DNA, 21 bp, synthetic construct
  source 1..21: mol_type = other DNA
cttccactttagacctctcca

SEQ ID NO: 16291-16299 - skipped (9 entries)

SEQ ID NO: 16300 - DNA, 21 bp, synthetic construct
  source 1..21: mol_type = other DNA
taaccaagtgctctgtagttt

SEQ ID NO: 16301-16309 - skipped (9 entries)

SEQ ID NO: 16310 - DNA, 21 bp, synthetic construct
  source 1..21: mol_type = other DNA
gtaaccaagtgctctgtagtt

SEQ ID NO: 16311-16319 - skipped (9 entries)

SEQ ID NO: 16320 - DNA, 21 bp, synthetic construct
  source 1..21: mol_type = other DNA
atctgggctcgcagaggtaat

SEQ ID NO: 16321-16329 - skipped (9 entries)

SEQ ID NO: 16330 - DNA, 21 bp, synthetic construct
  source 1..21: mol_type = other DNA
aaggttgatctgggctcgcag

SEQ ID NO: 16331-16339 - skipped (9 entries)

SEQ ID NO: 16340 - DNA, 21 bp, synthetic construct
  source 1..21: mol_type = other DNA
ccaacccccaagtgaattaaa

SEQ ID NO: 16341-16349 - skipped (9 entries)

SEQ ID NO: 16350 - DNA, 20 bp, synthetic construct
  source 1..20: mol_type = other DNA
tctaggtatgacaacgaatt

SEQ ID NO: 16351-16359 - skipped (9 entries)

SEQ ID NO: 16360 - DNA, 20 bp, synthetic construct
  source 1..20: mol_type = other DNA
agccccagcgtcaaaggtgg

SEQ ID NO: 16361-16369 - skipped (9 entries)

SEQ ID NO: 16370 - DNA, 20 bp, synthetic construct
  source 1..20: mol_type = other DNA
attgtatccacagtgaatct

SEQ ID NO: 16371-16379 - skipped (9 entries)

SEQ ID NO: 16380 - DNA, 20 bp, synthetic construct
  source 1..20: mol_type = other DNA
aaacgccgaatataatccca

SEQ ID NO: 16381-16389 - skipped (9 entries)

SEQ ID NO: 16390 - DNA, 20 bp, synthetic construct
  source 1..20: mol_type = other DNA
accattgtagcggtttgctg

SEQ ID NO: 16391-16399 - skipped (9 entries)

SEQ ID NO: 16400 - DNA, 20 bp, synthetic construct
  source 1..20: mol_type = other DNA
ggtttgctgcggtaatcatg

SEQ ID NO: 16401-16409 - skipped (9 entries)

SEQ ID NO: 16410 - DNA, 20 bp, synthetic construct
  source 1..20: mol_type = other DNA
gataagagagccacgaacca

SEQ ID NO: 16411-16419 - skipped (9 entries)

SEQ ID NO: 16420 - DNA, 20 bp, synthetic construct
  source 1..20: mol_type = other DNA
acggcactgattttcagttc

SEQ ID NO: 16421-16429 - skipped (9 entries)

SEQ ID NO: 16430 - DNA, 20 bp, synthetic construct
  source 1..20: mol_type = other DNA
cggcactgattttcagttct

SEQ ID NO: 16431-16439 - skipped (9 entries)

SEQ ID NO: 16440 - DNA, 20 bp, synthetic construct
  source 1..20: mol_type = other DNA
gattttcagttctgggaaaa

SEQ ID NO: 16441-16449 - skipped (9 entries)

SEQ ID NO: 16450 - DNA, 20 bp, synthetic construct
  source 1..20: mol_type = other DNA
tctgggaaaatggtgtgcac

SEQ ID NO: 16451-16459 - skipped (9 entries)

SEQ ID NO: 16460 - DNA, 20 bp, synthetic construct
  source 1..20: mol_type = other DNA
tggtgtgcacaggagccaag

SEQ ID NO: 16461-16469 - skipped (9 entries)

SEQ ID NO: 16470 - DNA, 20 bp, synthetic construct
  source 1..20: mol_type = other DNA
tagtgaagaacagtccagac

SEQ ID NO: 16471-16479 - skipped (9 entries)

SEQ ID NO: 16480 - DNA, 20 bp, synthetic construct
  source 1..20: mol_type = other DNA
tgctagagttgtacagaagt

SEQ ID NO: 16481-16489 - skipped (9 entries)

SEQ ID NO: 16490 - DNA, 20 bp, synthetic construct
  source 1..20: mol_type = other DNA
gctagagttgtacagaagtt

SEQ ID NO: 16491-16499 - skipped (9 entries)

SEQ ID NO: 16500 - DNA, 20 bp, synthetic construct
  source 1..20: mol_type = other DNA
gggttttccagctaagttct

SEQ ID NO: 16501-16509 - skipped (9 entries)

SEQ ID NO: 16510 - DNA, 20 bp, synthetic construct
  source 1..20: mol_type = other DNA
ggacttcaagattcagaata

SEQ ID NO: 16511-16519 - skipped (9 entries)

SEQ ID NO: 16520 - DNA, 20 bp, synthetic construct
  source 1..20: mol_type = other DNA
cttcaagattcagaatatgg

SEQ ID NO: 16521-16529 - skipped (9 entries)

SEQ ID NO: 16530 - DNA, 20 bp, synthetic construct
  source 1..20: mol_type = other DNA
ttcaagattcagaatatggt

SEQ ID NO: 16531-16539 - skipped (9 entries)

SEQ ID NO: 16540 - DNA, 20 bp, synthetic construct
  source 1..20: mol_type = other DNA
tcaagattcagaatatggtg

SEQ ID NO: 16541-16549 - skipped (9 entries)

SEQ ID NO: 16550 - DNA, 20 bp, synthetic construct
  source 1..20: mol_type = other DNA
gtgatgtgaagtttcctata

SEQ ID NO: 16551-16559 - skipped (9 entries)

SEQ ID NO: 16560 - DNA, 20 bp, synthetic construct
  source 1..20: mol_type = other DNA
aagtttcctataaggttaga

SEQ ID NO: 16561-16569 - skipped (9 entries)

SEQ ID NO: 16570 - DNA, 20 bp, synthetic construct
  source 1..20: mol_type = other DNA
tcacccaccaacaatttagt

SEQ ID NO: 16571-16579 - skipped (9 entries)

SEQ ID NO: 16580 - DNA, 20 bp, synthetic construct
  source 1..20: mol_type = other DNA
tatgagccagagttatttcc

SEQ ID NO: 16581-16589 - skipped (9 entries)

SEQ ID NO: 16590 - DNA, 20 bp, synthetic construct
  source 1..20: mol_type = other DNA
gttctccttatttttgtttc

SEQ ID NO: 16591-16599 - skipped (9 entries)

SEQ ID NO: 16600 - DNA, 20 bp, synthetic construct
  source 1..20: mol_type = other DNA
tctggaaaagttgtattaac

SEQ ID NO: 16601-16609 - skipped (9 entries)

SEQ ID NO: 16610 - DNA, 20 bp, synthetic construct
  source 1..20: mol_type = other DNA
aaacatctaccctattctaa

SEQ ID NO: 16611-16619 - skipped (9 entries)

SEQ ID NO: 16620 - DNA, 20 bp, synthetic construct
  source 1..20: mol_type = other DNA
accctattctaaagggattc

SEQ ID NO: 16621-16629 - skipped (9 entries)

SEQ ID NO: 16630 - DNA, 20 bp, synthetic construct
  source 1..20: mol_type = other DNA
gattcaggaagacgacgtaa

SEQ ID NO: 16631-16639 - skipped (9 entries)

SEQ ID NO: 16640 - DNA, 20 bp, synthetic construct
  source 1..20: mol_type = other DNA
cacgaagtgcaatggtcttt

SEQ ID NO: 16641-16649 - skipped (9 entries)

SEQ ID NO: 16650 - DNA, 20 bp, synthetic construct
  source 1..20: mol_type = other DNA
gtttcgggcacgaagtgcaa

SEQ ID NO: 16651-16659 - skipped (9 entries)

SEQ ID NO: 16660 - DNA, 20 bp, synthetic construct
  source 1..20: mol_type = other DNA
gggattatattcggcgtttc

SEQ ID NO: 16661-16669 - skipped (9 entries)

SEQ ID NO: 16670 - DNA, 20 bp, synthetic construct
  source 1..20: mol_type = other DNA
tgggattatattcggcgttt

SEQ ID NO: 16671-16679 - skipped (9 entries)

SEQ ID NO: 16680 - DNA, 20 bp, synthetic construct
  source 1..20: mol_type = other DNA
tctaaccttgggattatatt

SEQ ID NO: 16681-16689 - skipped (9 entries)

SEQ ID NO: 16690 - DNA, 20 bp, synthetic construct
  source 1..20: mol_type = other DNA
attaaaatagatctaacctt

SEQ ID NO: 16691-16699 - skipped (9 entries)

SEQ ID NO: 16700 - DNA, 20 bp, synthetic construct
  source 1..20: mol_type = other DNA
aaaatcagtgccgtggttcg

SEQ ID NO: 16701-16709 - skipped (9 entries)

SEQ ID NO: 16710 - DNA, 20 bp, synthetic construct
  source 1..20: mol_type = other DNA
agaactgaaaatcagtgccg

SEQ ID NO: 16711-16719 - skipped (9 entries)

SEQ ID NO: 16720 - DNA, 20 bp, synthetic construct
  source 1..20: mol_type = other DNA
aatttcttacggctacctct

SEQ ID NO: 16721-16729 - skipped (9 entries)

SEQ ID NO: 16730 - DNA, 20 bp, synthetic construct
  source 1..20: mol_type = other DNA
agtctggactgttcttcact

SEQ ID NO: 16731-16739 - skipped (9 entries)

SEQ ID NO: 16740 - DNA, 20 bp, synthetic construct
  source 1..20: mol_type = other DNA
atattttcttgctgccagtc

SEQ ID NO: 16741-16749 - skipped (9 entries)

SEQ ID NO: 16750 - DNA, 20 bp, synthetic construct
  source 1..20: mol_type = other DNA
ttgaagtccaagaacttagc

SEQ ID NO: 16751-16759 - skipped (9 entries)

SEQ ID NO: 16760 - DNA, 20 bp, synthetic construct
  source 1..20: mol_type = other DNA
acaaggccttctaaccttat

SEQ ID NO: 16761-16769 - skipped (9 entries)

SEQ ID NO: 16770 - DNA, 20 bp, synthetic construct
  source 1..20: mol_type = other DNA
attgttggtgggtgagcaca

SEQ ID NO: 16771-16779 - skipped (9 entries)

SEQ ID NO: 16780 - DNA, 20 bp, synthetic construct
  source 1..20: mol_type = other DNA
ttacctactaaattgttggt

SEQ ID NO: 16781-16789 - skipped (9 entries)

SEQ ID NO: 16790 - DNA, 20 bp, synthetic construct
  source 1..20: mol_type = other DNA
cttacctactaaattgttgg

SEQ ID NO: 16791-16799 - skipped (9 entries)

SEQ ID NO: 16800 - DNA, 20 bp, synthetic construct
  source 1..20: mol_type = other DNA
agacttacctactaaattgt

SEQ ID NO: 16801-16809 - skipped (9 entries)

SEQ ID NO: 16810 - DNA, 20 bp, synthetic construct
  source 1..20: mol_type = other DNA
attaaaccaggaaataactc

SEQ ID NO: 16811-16819 - skipped (9 entries)

SEQ ID NO: 16820 - DNA, 20 bp, synthetic construct
  source 1..20: mol_type = other DNA
atcattctgtagattaaacc

SEQ ID NO: 16821-16829 - skipped (9 entries)

SEQ ID NO: 16830 - DNA, 20 bp, synthetic construct
  source 1..20: mol_type = other DNA
aaaataaggagaacaattct

SEQ ID NO: 16831-16839 - skipped (9 entries)

SEQ ID NO: 16840 - DNA, 20 bp, synthetic construct
  source 1..20: mol_type = other DNA
cttttccagaaacaaaaata

SEQ ID NO: 16841-16849 - skipped (9 entries)

SEQ ID NO: 16850 - DNA, 20 bp, synthetic construct
  source 1..20: mol_type = other DNA
tcctgaatccctttagaata

SEQ ID NO: 16851-16859 - skipped (9 entries)

SEQ ID NO: 16860 - DNA, 20 bp, synthetic construct
  source 1..20: mol_type = other DNA
ttcctgaatccctttagaat

SEQ ID NO: 16861-16869 - skipped (9 entries)

SEQ ID NO: 16870 - DNA, 20 bp, synthetic construct
  source 1..20: mol_type = other DNA
ctcactcccactgctgtccc

SEQ ID NO: 16871-16879 - skipped (9 entries)

SEQ ID NO: 16880 - DNA, 20 bp, synthetic construct
  source 1..20: mol_type = other DNA
ccctggcagtgcagaagtcc

SEQ ID NO: 16881-16889 - skipped (9 entries)

SEQ ID NO: 16890 - DNA, 20 bp, synthetic construct
  source 1..20: mol_type = other DNA
cctggcagtgcagaagtcca

SEQ ID NO: 16891-16899 - skipped (9 entries)

SEQ ID NO: 16900 - DNA, 20 bp, synthetic construct
  source 1..20: mol_type = other DNA
cagtgcagaagtccagggaa

SEQ ID NO: 16901-16909 - skipped (9 entries)

SEQ ID NO: 16910 - DNA, 20 bp, synthetic construct
  source 1..20: mol_type = other DNA
gcagaagtccagggaatggc

SEQ ID NO: 16911-16919 - skipped (9 entries)

SEQ ID NO: 16920 - DNA, 20 bp, synthetic construct
  source 1..20: mol_type = other DNA
ggcccagcagctgagatcac

SEQ ID NO: 16921-16929 - skipped (9 entries)

SEQ ID NO: 16930 - DNA, 20 bp, synthetic construct
  source 1..20: mol_type = other DNA
ggggctatcattgtagtgag

SEQ ID NO: 16931-16939 - skipped (9 entries)

SEQ ID NO: 16940 - DNA, 20 bp, synthetic construct
  source 1..20: mol_type = other DNA
gctatcattgtagtgagtgg

SEQ ID NO: 16941-16949 - skipped (9 entries)

SEQ ID NO: 16950 - DNA, 20 bp, synthetic construct
  source 1..20: mol_type = other DNA
attgtagtgagtggcggccc

SEQ ID NO: 16951-16959 - skipped (9 entries)

SEQ ID NO: 16960 - DNA, 20 bp, synthetic construct
  source 1..20: mol_type = other DNA
ttgtagtgagtggcggccct

SEQ ID NO: 16961-16969 - skipped (9 entries)

SEQ ID NO: 16970 - DNA, 20 bp, synthetic construct
  source 1..20: mol_type = other DNA
cggccctgggactgatagca

SEQ ID NO: 16971-16979 - skipped (9 entries)

SEQ ID NO: 16980 - DNA, 20 bp, synthetic construct
  source 1..20: mol_type = other DNA
gggactgatagcaaggacag

SEQ ID NO: 16981-16989 - skipped (9 entries)

SEQ ID NO: 16990 - DNA, 20 bp, synthetic construct
  source 1..20: mol_type = other DNA
tgagctcagttcactcccac

SEQ ID NO: 16991-16999 - skipped (9 entries)

SEQ ID NO: 17000 - DNA, 20 bp, synthetic construct
  source 1..20: mol_type = other DNA
gagctcagttcactcccact

SEQ ID NO: 17001-17009 - skipped (9 entries)

SEQ ID NO: 17010 - DNA, 20 bp, synthetic construct
  source 1..20: mol_type = other DNA
cccactgggcccaacaacac

SEQ ID NO: 17011-17019 - skipped (9 entries)

SEQ ID NO: 17020 - DNA, 20 bp, synthetic construct
  source 1..20: mol_type = other DNA
gcccaacaacactggacacc

SEQ ID NO: 17021-17029 - skipped (9 entries)

SEQ ID NO: 17030 - DNA, 20 bp, synthetic construct
  source 1..20: mol_type = other DNA
actgcagtcttctgccctgc

SEQ ID NO: 17031-17039 - skipped (9 entries)

SEQ ID NO: 17040 - DNA, 20 bp, synthetic construct
  source 1..20: mol_type = other DNA
agtaacagcagcagttcgtc

SEQ ID NO: 17041-17049 - skipped (9 entries)

SEQ ID NO: 17050 - DNA, 20 bp, synthetic construct
  source 1..20: mol_type = other DNA
tacctcctttgagcccatca

SEQ ID NO: 17051-17059 - skipped (9 entries)

SEQ ID NO: 17060 - DNA, 20 bp, synthetic construct
  source 1..20: mol_type = other DNA
cccatcaaggcagaccccac

SEQ ID NO: 17061-17069 - skipped (9 entries)

SEQ ID NO: 17070 - DNA, 20 bp, synthetic construct
  source 1..20: mol_type = other DNA
atcaaggcagaccccacagg

SEQ ID NO: 17071-17079 - skipped (9 entries)

SEQ ID NO: 17080 - DNA, 20 bp, synthetic construct
  source 1..20: mol_type = other DNA
gaaatctttgatcccacacg

SEQ ID NO: 17081-17089 - skipped (9 entries)

SEQ ID NO: 17090 - DNA, 20 bp, synthetic construct
  source 1..20: mol_type = other DNA
tctttgatcccacacgaggt

SEQ ID NO: 17091-17099 - skipped (9 entries)

SEQ ID NO: 17100 - DNA, 20 bp, synthetic construct
  source 1..20: mol_type = other DNA
attcccagagtgcatgagct

SEQ ID NO: 17101-17109 - skipped (9 entries)

SEQ ID NO: 17110 - DNA, 20 bp, synthetic construct
  source 1..20: mol_type = other DNA
gtgcatgagctcggagctgc

SEQ ID NO: 17111-17119 - skipped (9 entries)

SEQ ID NO: 17120 - DNA, 20 bp, synthetic construct
  source 1..20: mol_type = other DNA
gaggagttgatgtcctcaga

SEQ ID NO: 17121-17129 - skipped (9 entries)

SEQ ID NO: 17130 - DNA, 20 bp, synthetic construct
  source 1..20: mol_type = other DNA
gagttgatgtcctcagaagg

SEQ ID NO: 17131-17139 - skipped (9 entries)

SEQ ID NO: 17140 - DNA, 20 bp, synthetic construct
  source 1..20: mol_type = other DNA
agttgatgtcctcagaaggt

SEQ ID NO: 17141-17149 - skipped (9 entries)

SEQ ID NO: 17150 - DNA, 20 bp, synthetic construct
  source 1..20: mol_type = other DNA
gcttcgtctttctccacccc

SEQ ID NO: 17151-17159 - skipped (9 entries)

SEQ ID NO: 17160 - DNA, 20 bp, synthetic construct
  source 1..20: mol_type = other DNA
cttcgtctttctccaccccc

SEQ ID NO: 17161-17169 - skipped (9 entries)

SEQ ID NO: 17170 - DNA, 20 bp, synthetic construct
  source 1..20: mol_type = other DNA
ccacgattatatctacaacc

SEQ ID NO: 17171-17179 - skipped (9 entries)

SEQ ID NO: 17180 - DNA, 20 bp, synthetic construct
  source 1..20: mol_type = other DNA
tacaacctggacgagagtga

SEQ ID NO: 17181-17189 - skipped (9 entries)

SEQ ID NO: 17190 - DNA, 20 bp, synthetic construct
  source 1..20: mol_type = other DNA
gcactgccagggacagcagt

SEQ ID NO: 17191-17199 - skipped (9 entries)

SEQ ID NO: 17200 - DNA, 20 bp, synthetic construct
  source 1..20: mol_type = other DNA
tgcactgccagggacagcag

SEQ ID NO: 17201-17209 - skipped (9 entries)

SEQ ID NO: 17210 - DNA, 20 bp, synthetic construct
  source 1..20: mol_type = other DNA
cctggacttctgcactgcca

SEQ ID NO: 17211-17219 - skipped (9 entries)

SEQ ID NO: 17220 - DNA, 20 bp, synthetic construct
  source 1..20: mol_type = other DNA
ccctggacttctgcactgcc

SEQ ID NO: 17221-17229 - skipped (9 entries)

SEQ ID NO: 17230 - DNA, 20 bp, synthetic construct
  source 1..20: mol_type = other DNA
ctgctgggccagccattccc

SEQ ID NO: 17231-17239 - skipped (9 entries)

SEQ ID NO: 17240 - DNA, 20 bp, synthetic construct
  source 1..20: mol_type = other DNA
tgtccttgctatcagtccca

SEQ ID NO: 17241-17249 - skipped (9 entries)

SEQ ID NO: 17250 - DNA, 20 bp, synthetic construct
  source 1..20: mol_type = other DNA
ctgtccttgctatcagtccc

SEQ ID NO: 17251-17259 - skipped (9 entries)

SEQ ID NO: 17260 - DNA, 20 bp, synthetic construct
  source 1..20: mol_type = other DNA
ccagtgttgttgggcccagt

SEQ ID NO: 17261-17269 - skipped (9 entries)

SEQ ID NO: 17270 - DNA, 20 bp, synthetic construct
  source 1..20: mol_type = other DNA
tccagtgttgttgggcccag

SEQ ID NO: 17271-17279 - skipped (9 entries)

SEQ ID NO: 17280 - DNA, 20 bp, synthetic construct
  source 1..20: mol_type = other DNA
gccgggtgtccagtgttgtt

SEQ ID NO: 17281-17289 - skipped (9 entries)

SEQ ID NO: 17290 - DNA, 20 bp, synthetic construct
  source 1..20: mol_type = other DNA
ggccgggtgtccagtgttgt

SEQ ID NO: 17291-17299 - skipped (9 entries)

SEQ ID NO: 17300 - DNA, 20 bp, synthetic construct
  source 1..20: mol_type = other DNA
agcagggcagaagactgcag

SEQ ID NO: 17301-17309 - skipped (9 entries)

SEQ ID NO: 17310 - DNA, 20 bp, synthetic construct
  source 1..20: mol_type = other DNA
gctgctgctgctgtccagca

SEQ ID NO: 17311-17319 - skipped (9 entries)

SEQ ID NO: 17320 - DNA, 20 bp, synthetic construct
  source 1..20: mol_type = other DNA
ggaggtagaagggttgggtc

SEQ ID NO: 17321-17329 - skipped (9 entries)

SEQ ID NO: 17330 - DNA, 20 bp, synthetic construct
  source 1..20: mol_type = other DNA
tgggctcaaaggaggtagaa

SEQ ID NO: 17331-17339 - skipped (9 entries)

SEQ ID NO: 17340 - DNA, 20 bp, synthetic construct
  source 1..20: mol_type = other DNA
atgggctcaaaggaggtaga

SEQ ID NO: 17341-17349 - skipped (9 entries)

SEQ ID NO: 17350 - DNA, 20 bp, synthetic construct
  source 1..20: mol_type = other DNA
tgccttgatgggctcaaagg

SEQ ID NO: 17351-17359 - skipped (9 entries)

SEQ ID NO: 17360 - DNA, 20 bp, synthetic construct
  source 1..20: mol_type = other DNA
gtctgccttgatgggctcaa

SEQ ID NO: 17361-17369 - skipped (9 entries)

SEQ ID NO: 17370 - DNA, 20 bp, synthetic construct
  source 1..20: mol_type = other DNA
cctgtggggtctgccttgat

SEQ ID NO: 17371-17379 - skipped (9 entries)

SEQ ID NO: 17380 - DNA, 20 bp, synthetic construct
  source 1..20: mol_type = other DNA
acctgtggggtctgccttga

SEQ ID NO: 17381-17389 - skipped (9 entries)

SEQ ID NO: 17390 - DNA, 20 bp, synthetic construct
  source 1..20: mol_type = other DNA
gcaggtactcaccacctgtg

SEQ ID NO: 17391-17399 - skipped (9 entries)

SEQ ID NO: 17400 - DNA, 20 bp, synthetic construct
  source 1..20: mol_type = other DNA
ggcaggtactcaccacctgt

SEQ ID NO: 17401-17409 - skipped (9 entries)

SEQ ID NO: 17410 - DNA, 20 bp, synthetic construct
  source 1..20: mol_type = other DNA
gggcaggtactcaccacctg

SEQ ID NO: 17411-17419 - skipped (9 entries)

SEQ ID NO: 17420 - DNA, 20 bp, synthetic construct
  source 1..20: mol_type = other DNA
agatttctgacagctctttg

SEQ ID NO: 17421-17429 - skipped (9 entries)

SEQ ID NO: 17430 - DNA, 20 bp, synthetic construct
  source 1..20: mol_type = other DNA
aagatttctgacagctcttt

SEQ ID NO: 17431-17439 - skipped (9 entries)

SEQ ID NO: 17440 - DNA, 20 bp, synthetic construct
  source 1..20: mol_type = other DNA
aaagatttctgacagctctt

SEQ ID NO: 17441-17449 - skipped (9 entries)

SEQ ID NO: 17450 - DNA, 20 bp, synthetic construct
  source 1..20: mol_type = other DNA
tgcagcagcctacctcgtgt

SEQ ID NO: 17451-17459 - skipped (9 entries)

SEQ ID NO: 17460 - DNA, 20 bp, synthetic construct
  source 1..20: mol_type = other DNA
atgcagcagcctacctcgtg

SEQ ID NO: 17461-17469 - skipped (9 entries)

SEQ ID NO: 17470 - DNA, 20 bp, synthetic construct
  source 1..20: mol_type = other DNA
gctccgagctcatgcactct

SEQ ID NO: 17471-17479 - skipped (9 entries)

SEQ ID NO: 17480 - DNA, 20 bp, synthetic construct
  source 1..20: mol_type = other DNA
agctccgagctcatgcactc

SEQ ID NO: 17481-17489 - skipped (9 entries)

SEQ ID NO: 17490 - DNA, 20 bp, synthetic construct
  source 1..20: mol_type = other DNA
ccagggccacccaccttctg

SEQ ID NO: 17491-17499 - skipped (9 entries)

SEQ ID NO: 17500 - DNA, 20 bp, synthetic construct
  source 1..20: mol_type = other DNA
tggagaaagacgaagcagag

SEQ ID NO: 17501-17509 - skipped (9 entries)

SEQ ID NO: 17510 - DNA, 20 bp, synthetic construct
  source 1..20: mol_type = other DNA
gtggagaaagacgaagcaga

SEQ ID NO: 17511-17519 - skipped (9 entries)

SEQ ID NO: 17520 - DNA, 20 bp, synthetic construct
  source 1..20: mol_type = other DNA
ggtggagaaagacgaagcag

SEQ ID NO: 17521-17529 - skipped (9 entries)

SEQ ID NO: 17530 - DNA, 20 bp, synthetic construct
  source 1..20: mol_type = other DNA
taatcgtggtctcccggggg

SEQ ID NO: 17531-17539 - skipped (9 entries)

SEQ ID NO: 17540 - DNA, 20 bp, synthetic construct
  source 1..20: mol_type = other DNA
atataatcgtggtctcccgg

SEQ ID NO: 17541-17549 - skipped (9 entries)

SEQ ID NO: 17550 - DNA, 20 bp, synthetic construct
  source 1..20: mol_type = other DNA
gatataatcgtggtctcccg

SEQ ID NO: 17551-17559 - skipped (9 entries)

SEQ ID NO: 17560 - DNA, 20 bp, synthetic construct
  source 1..20: mol_type = other DNA
agatataatcgtggtctccc

SEQ ID NO: 17561-17569 - skipped (9 entries)

SEQ ID NO: 17570 - DNA, 20 bp, synthetic construct
  source 1..20: mol_type = other DNA
tagatataatcgtggtctcc

SEQ ID NO: 17571-17579 - skipped (9 entries)

SEQ ID NO: 17580 - DNA, 20 bp, synthetic construct
  source 1..20: mol_type = other DNA
ccaggttgtagatataatcg

SEQ ID NO: 17581-17589 - skipped (9 entries)

SEQ ID NO: 17590 - DNA, 20 bp, synthetic construct
  source 1..20: mol_type = other DNA
agacaccttcactctcgtcc

SEQ ID NO: 17591-17599 - skipped (9 entries)

SEQ ID NO: 17600 - DNA, 20 bp, synthetic construct
  source 1..20: mol_type = other DNA
tgagaacaggcacatcaaag

SEQ ID NO: 17601-17609 - skipped (9 entries)

SEQ ID NO: 17610 - DNA, 20 bp, synthetic construct
  source 1..20: mol_type = other DNA
gtgggggttcacccacttgt

SEQ ID NO: 17611-17619 - skipped (9 entries)

SEQ ID NO: 17620 - DNA, 20 bp, synthetic construct
  source 1..20: mol_type = other DNA
acttgtaggtgccctcatac

SEQ ID NO: 17621-17629 - skipped (9 entries)

SEQ ID NO: 17630 - DNA, 20 bp, synthetic construct
  source 1..20: mol_type = other DNA
catcagctcgtctgcctccg

SEQ ID NO: 17631-17639 - skipped (9 entries)

SEQ ID NO: 17640 - DNA, 20 bp, synthetic construct
  source 1..20: mol_type = other DNA
atcagctcgtctgcctccgt

SEQ ID NO: 17641-17649 - skipped (9 entries)

SEQ ID NO: 17650 - DNA, 20 bp, synthetic construct
  source 1..20: mol_type = other DNA
tcagctcgtctgcctccgtg

SEQ ID NO: 17651-17659 - skipped (9 entries)

SEQ ID NO: 17660 - DNA, 20 bp, synthetic construct
  source 1..20: mol_type = other DNA
cgtctgcctccgtggggcct

SEQ ID NO: 17661-17669 - skipped (9 entries)

SEQ ID NO: 17670 - DNA, 20 bp, synthetic construct
  source 1..20: mol_type = other DNA
tgcctccgtggggcctcggc

SEQ ID NO: 17671-17679 - skipped (9 entries)

SEQ ID NO: 17680 - DNA, 20 bp, synthetic construct
  source 1..20: mol_type = other DNA
tcctcacctgccataaatat

SEQ ID NO: 17681-17689 - skipped (9 entries)

SEQ ID NO: 17690 - DNA, 20 bp, synthetic construct
  source 1..20: mol_type = other DNA
cctcacctgccataaatata

SEQ ID NO: 17691-17699 - skipped (9 entries)

SEQ ID NO: 17700 - DNA, 20 bp, synthetic construct
  source 1..20: mol_type = other DNA
ctcacctgccataaatatag

SEQ ID NO: 17701-17709 - skipped (9 entries)

SEQ ID NO: 17710 - DNA, 20 bp, synthetic construct
  source 1..20: mol_type = other DNA
cctgccataaatatagggga

SEQ ID NO: 17711-17719 - skipped (9 entries)

SEQ ID NO: 17720 - DNA, 20 bp, synthetic construct
  source 1..20: mol_type = other DNA
ctgccataaatataggggat

SEQ ID NO: 17721-17729 - skipped (9 entries)

SEQ ID NO: 17730 - DNA, 20 bp, synthetic construct
  source 1..20: mol_type = other DNA
ataaatataggggatgggct

SEQ ID NO: 17731-17739 - skipped (9 entries)

SEQ ID NO: 17740 - DNA, 20 bp, synthetic construct
  source 1..20: mol_type = other DNA
taaatataggggatgggctt

SEQ ID NO: 17741-17749 - skipped (9 entries)

SEQ ID NO: 17750 - DNA, 20 bp, synthetic construct
  source 1..20: mol_type = other DNA
tgggcttctccagctcaatc

SEQ ID NO: 17751-17759 - skipped (9 entries)

SEQ ID NO: 17760 - DNA, 20 bp, synthetic construct
  source 1..20: mol_type = other DNA
agctcaatctggtgcagcag

SEQ ID NO: 17761-17769 - skipped (9 entries)

SEQ ID NO: 17770 - DNA, 20 bp, synthetic construct
  source 1..20: mol_type = other DNA
gctcaatctggtgcagcagt

SEQ ID NO: 17771-17779 - skipped (9 entries)

SEQ ID NO: 17780 - DNA, 20 bp, synthetic construct
  source 1..20: mol_type = other DNA
ctcaatctggtgcagcagtg

SEQ ID NO: 17781-17789 - skipped (9 entries)

SEQ ID NO: 17790 - DNA, 20 bp, synthetic construct
  source 1..20: mol_type = other DNA
cagtggggtgaaaatacgcc

SEQ ID NO: 17791-17799 - skipped (9 entries)

SEQ ID NO: 17800 - DNA, 20 bp, synthetic construct
  source 1..20: mol_type = other DNA
tgaaaatacgccaggcctca

SEQ ID NO: 17801-17809 - skipped (9 entries)

SEQ ID NO: 17810 - DNA, 20 bp, synthetic construct
  source 1..20: mol_type = other DNA
cctcacggagctcgtcgctg

SEQ ID NO: 17811-17819 - skipped (9 entries)

SEQ ID NO: 17820 - DNA, 20 bp, synthetic construct
  source 1..20: mol_type = other DNA
acctgcgcacgaagtgcatc

SEQ ID NO: 17821-17829 - skipped (9 entries)

SEQ ID NO: 17830 - DNA, 20 bp, synthetic construct
  source 1..20: mol_type = other DNA
ggctcccgcagaagacgtcc

SEQ ID NO: 17831-17839 - skipped (9 entries)

SEQ ID NO: 17840 - DNA, 20 bp, synthetic construct
  source 1..20: mol_type = other DNA
cgcagaagacgtccaggatg

SEQ ID NO: 17841-17849 - skipped (9 entries)

SEQ ID NO: 17850 - DNA, 20 bp, synthetic construct
  source 1..20: mol_type = other DNA
gtccaggatgaggcgctcat

SEQ ID NO: 17851-17859 - skipped (9 entries)

SEQ ID NO: 17860 - DNA, 20 bp, synthetic construct
  source 1..20: mol_type = other DNA
atgaggcgctcataggcgtc

SEQ ID NO: 17861-17869 - skipped (9 entries)

SEQ ID NO: 17870 - DNA, 20 bp, synthetic construct
  source 1..20: mol_type = other DNA
tgaggcgctcataggcgtca

SEQ ID NO: 17871-17879 - skipped (9 entries)

SEQ ID NO: 17880 - DNA, 20 bp, synthetic construct
  source 1..20: mol_type = other DNA
caccttgtatctgttgccgt

SEQ ID NO: 17881-17889 - skipped (9 entries)

SEQ ID NO: 17890 - DNA, 20 bp, synthetic construct
  source 1..20: mol_type = other DNA
tgtatctgttgccgtaggtc

SEQ ID NO: 17891-17899 - skipped (9 entries)

SEQ ID NO: 17900 - DNA, 20 bp, synthetic construct
  source 1..20: mol_type = other DNA
caggtccagctccgactcct

SEQ ID NO: 17901-17909 - skipped (9 entries)

SEQ ID NO: 17910 - DNA, 20 bp, synthetic construct
  source 1..20: mol_type = other DNA
aggtccagctccgactcctc

SEQ ID NO: 17911-17919 - skipped (9 entries)

SEQ ID NO: 17920 - DNA, 20 bp, synthetic construct
  source 1..20: mol_type = other DNA
ggtccagctccgactcctcg

SEQ ID NO: 17921-17929 - skipped (9 entries)

SEQ ID NO: 17930 - DNA, 20 bp, synthetic construct
  source 1..20: mol_type = other DNA
tcggggttgaagaacatgcc

SEQ ID NO: 17931-17939 - skipped (9 entries)

SEQ ID NO: 17940 - DNA, 20 bp, synthetic construct
  source 1..20: mol_type = other DNA
gaagaacatgcccggcttct

SEQ ID NO: 17941-17949 - skipped (9 entries)

SEQ ID NO: 17950 - DNA, 20 bp, synthetic construct
  source 1..20: mol_type = other DNA
cggcttcttggtcatcatct

SEQ ID NO: 17951-17959 - skipped (9 entries)

SEQ ID NO: 17960 - DNA, 20 bp, synthetic construct
  source 1..20: mol_type = other DNA
ggtcatcatcttggtgtaca

SEQ ID NO: 17961-17969 - skipped (9 entries)

SEQ ID NO: 17970 - DNA, 20 bp, synthetic construct
  source 1..20: mol_type = other DNA
cttggtgtacacggcctcgt

SEQ ID NO: 17971-17979 - skipped (9 entries)

SEQ ID NO: 17980 - DNA, 20 bp, synthetic construct
  source 1..20: mol_type = other DNA
ttggtgtacacggcctcgtt

SEQ ID NO: 17981-17989 - skipped (9 entries)

SEQ ID NO: 17990 - DNA, 20 bp, synthetic construct
  source 1..20: mol_type = other DNA
cggcctcgttgggctgcacg

SEQ ID NO: 17991-17999 - skipped (9 entries)

SEQ ID NO: 18000 - DNA, 20 bp, synthetic construct
  source 1..20: mol_type = other DNA
gctcgttgcgcttgcactgc

SEQ ID NO: 18001-18009 - skipped (9 entries)

SEQ ID NO: 18010 - DNA, 20 bp, synthetic construct
  source 1..20: mol_type = other DNA
cgttgcgcttgcactgctgg

SEQ ID NO: 18011-18019 - skipped (9 entries)

SEQ ID NO: 18020 - DNA, 20 bp, synthetic construct
  source 1..20: mol_type = other DNA
ctgctggtggaagatgtcgc

SEQ ID NO: 18021-18029 - skipped (9 entries)

SEQ ID NO: 18030 - DNA, 20 bp, synthetic construct
  source 1..20: mol_type = other DNA
agatgtcgccggccacatca

SEQ ID NO: 18031-18039 - skipped (9 entries)

SEQ ID NO: 18040 - DNA, 20 bp, synthetic construct
  source 1..20: mol_type = other DNA
atggaactgcagcctcacct

SEQ ID NO: 18041-18049 - skipped (9 entries)

SEQ ID NO: 18050 - DNA, 20 bp, synthetic construct
  source 1..20: mol_type = other DNA
cctcggccttgcgctcgttc

SEQ ID NO: 18051-18059 - skipped (9 entries)

SEQ ID NO: 18060 - DNA, 20 bp, synthetic construct
  source 1..20: mol_type = other DNA
ctcggccttgcgctcgttca

SEQ ID NO: 18061-18069 - skipped (9 entries)

SEQ ID NO: 18070 - DNA, 20 bp, synthetic construct
  source 1..20: mol_type = other DNA
tcagggccttgccgcagcgc

SEQ ID NO: 18071-18079 - skipped (9 entries)

SEQ ID NO: 18080 - DNA, 20 bp, synthetic construct
  source 1..20: mol_type = other DNA
cttgccgcagcgcaggatga

SEQ ID NO: 18081-18089 - skipped (9 entries)

SEQ ID NO: 18090 - DNA, 20 bp, synthetic construct
  source 1..20: mol_type = other DNA
ttgccgcagcgcaggatgaa

SEQ ID NO: 18091-18099 - skipped (9 entries)

SEQ ID NO: 18100 - DNA, 20 bp, synthetic construct
  source 1..20: mol_type = other DNA
gtatgagggcacctacaagt

SEQ ID NO: 18101-18109 - skipped (9 entries)

SEQ ID NO: 18110 - DNA, 20 bp, synthetic construct
  source 1..20: mol_type = other DNA
agtatgagggcacctacaag

SEQ ID NO: 18111-18119 - skipped (9 entries)

SEQ ID NO: 18120 - DNA, 20 bp, synthetic construct
  source 1..20: mol_type = other DNA
agagtgggtttccagtatga

SEQ ID NO: 18121-18129 - skipped (9 entries)

SEQ ID NO: 18130 - DNA, 20 bp, synthetic construct
  source 1..20: mol_type = other DNA
gagagtgggtttccagtatg

SEQ ID NO: 18131-18139 - skipped (9 entries)

SEQ ID NO: 18140 - DNA, 20 bp, synthetic construct
  source 1..20: mol_type = other DNA
gacgagctgatgaagagagt

SEQ ID NO: 18141-18149 - skipped (9 entries)

SEQ ID NO: 18150 - DNA, 20 bp, synthetic construct
  source 1..20: mol_type = other DNA
agacgagctgatgaagagag

SEQ ID NO: 18151-18159 - skipped (9 entries)

SEQ ID NO: 18160 - DNA, 20 bp, synthetic construct
  source 1..20: mol_type = other DNA
ctccagccgaggccccacgg

SEQ ID NO: 18161-18169 - skipped (9 entries)

SEQ ID NO: 18170 - DNA, 20 bp, synthetic construct
  source 1..20: mol_type = other DNA
cacccgtcactctccagccg

SEQ ID NO: 18171-18179 - skipped (9 entries)

SEQ ID NO: 18180 - DNA, 20 bp, synthetic construct
  source 1..20: mol_type = other DNA
ccatcccctatatttatggc

SEQ ID NO: 18181-18189 - skipped (9 entries)

SEQ ID NO: 18190 - DNA, 20 bp, synthetic construct
  source 1..20: mol_type = other DNA
aagcccatcccctatattta

SEQ ID NO: 18191-18199 - skipped (9 entries)

SEQ ID NO: 18200 - DNA, 20 bp, synthetic construct
  source 1..20: mol_type = other DNA
actgctgcaccagattgagc

SEQ ID NO: 18201-18209 - skipped (9 entries)

SEQ ID NO: 18210 - DNA, 20 bp, synthetic construct
  source 1..20: mol_type = other DNA
gcgacgagctccgtgaggcc

SEQ ID NO: 18211-18219 - skipped (9 entries)

SEQ ID NO: 18220 - DNA, 20 bp, synthetic construct
  source 1..20: mol_type = other DNA
cctcagcgacgagctccgtg

SEQ ID NO: 18221-18229 - skipped (9 entries)

SEQ ID NO: 18230 - DNA, 20 bp, synthetic construct
  source 1..20: mol_type = other DNA
gccagatgcacttcgtgcgc

SEQ ID NO: 18231-18239 - skipped (9 entries)

SEQ ID NO: 18240 - DNA, 20 bp, synthetic construct
  source 1..20: mol_type = other DNA
tcatcctggacgtcttctgc

SEQ ID NO: 18241-18249 - skipped (9 entries)

SEQ ID NO: 18250 - DNA, 20 bp, synthetic construct
  source 1..20: mol_type = other DNA
ctcatcctggacgtcttctg

SEQ ID NO: 18251-18259 - skipped (9 entries)

SEQ ID NO: 18260 - DNA, 20 bp, synthetic construct
  source 1..20: mol_type = other DNA
cgcctatgagcgcctcatcc

SEQ ID NO: 18261-18269 - skipped (9 entries)

SEQ ID NO: 18270 - DNA, 20 bp, synthetic construct
  source 1..20: mol_type = other DNA
gacctacggcaacagataca

SEQ ID NO: 18271-18279 - skipped (9 entries)

SEQ ID NO: 18280 - DNA, 20 bp, synthetic construct
  source 1..20: mol_type = other DNA
tcggagctggacctgaccta

SEQ ID NO: 18281-18289 - skipped (9 entries)

SEQ ID NO: 18290 - DNA, 20 bp, synthetic construct
  source 1..20: mol_type = other DNA
caaccccgaggagtcggagc

SEQ ID NO: 18291-18299 - skipped (9 entries)

SEQ ID NO: 18300 - DNA, 20 bp, synthetic construct
  source 1..20: mol_type = other DNA
gttcttcaaccccgaggagt

SEQ ID NO: 18301-18309 - skipped (9 entries)

SEQ ID NO: 18310 - DNA, 20 bp, synthetic construct
  source 1..20: mol_type = other DNA
gggcatgttcttcaaccccg

SEQ ID NO: 18311-18319 - skipped (9 entries)

SEQ ID NO: 18320 - DNA, 20 bp, synthetic construct
  source 1..20: mol_type = other DNA
aagatgatgaccaagaagcc

SEQ ID NO: 18321-18329 - skipped (9 entries)

SEQ ID NO: 18330 - DNA, 20 bp, synthetic construct
  source 1..20: mol_type = other DNA
caagatgatgaccaagaagc

SEQ ID NO: 18331-18339 - skipped (9 entries)

SEQ ID NO: 18340 - DNA, 20 bp, synthetic construct
  source 1..20: mol_type = other DNA
gatccgcgtgcagcccaacg

SEQ ID NO: 18341-18349 - skipped (9 entries)

SEQ ID NO: 18350 - DNA, 20 bp, synthetic construct
  source 1..20: mol_type = other DNA
gcagtgcaagcgcaacgagc

SEQ ID NO: 18351-18359 - skipped (9 entries)

SEQ ID NO: 18360 - DNA, 20 bp, synthetic construct
  source 1..20: mol_type = other DNA
ctgcagttccatgatgtggc

SEQ ID NO: 18361-18369 - skipped (9 entries)

SEQ ID NO: 18370 - DNA, 20 bp, synthetic construct
  source 1..20: mol_type = other DNA
gaggctgcagttccatgatg

SEQ ID NO: 18371-18379 - skipped (9 entries)

SEQ ID NO: 18380 - DNA, 20 bp, synthetic construct
  source 1..20: mol_type = other DNA
acgagcgcaaggccgaggtg

SEQ ID NO: 18381-18389 - skipped (9 entries)

SEQ ID NO: 18390 - DNA, 20 bp, synthetic construct
  source 1..20: mol_type = other DNA
cctgaacgagcgcaaggccg

SEQ ID NO: 18391-18399 - skipped (9 entries)

SEQ ID NO: 18400 - DNA, 20 bp, synthetic construct
  source 1..20: mol_type = other DNA
caaggccctgaacgagcgca

SEQ ID NO: 18401-18409 - skipped (9 entries)

SEQ ID NO: 18410 - DNA, 20 bp, synthetic construct
  source 1..20: mol_type = other DNA
cttcatcctgcgctgcggca

SEQ ID NO: 18411-18419 - skipped (9 entries)

SEQ ID NO: 18420 - DNA, 20 bp, synthetic construct
  source 1..20: mol_type = other DNA
gtgcccttcatcctgcgctg

SEQ ID NO: 18421-18429 - skipped (9 entries)

SEQ ID NO: 18430 - DNA, 20 bp, synthetic construct
  source 1..20: mol_type = other DNA
agaatgagaggtgggatggt

SEQ ID NO: 18431-18439 - skipped (9 entries)

SEQ ID NO: 18440 - DNA, 20 bp, synthetic construct
  source 1..20: mol_type = other DNA
gtggagaatgagaggtggga

SEQ ID NO: 18441-18449 - skipped (9 entries)

SEQ ID NO: 18450 - DNA, 20 bp, synthetic construct
  source 1..20: mol_type = other DNA
cttaatgaaaccataaaaat

SEQ ID NO: 18451-18459 - skipped (9 entries)

SEQ ID NO: 18460 - DNA, 20 bp, synthetic construct
  source 1..20: mol_type = other DNA
gactaagcttaattgctttc

SEQ ID NO: 18461-18469 - skipped (9 entries)

SEQ ID NO: 18470 - DNA, 20 bp, synthetic construct
  source 1..20: mol_type = other DNA
gcttaattgctttctggaac

SEQ ID NO: 18471-18479 - skipped (9 entries)

SEQ ID NO: 18480 - DNA, 20 bp, synthetic construct
  source 1..20: mol_type = other DNA
tctggaacaggatctgaaac

SEQ ID NO: 18481-18489 - skipped (9 entries)

SEQ ID NO: 18490 - DNA, 20 bp, synthetic construct
  source 1..20: mol_type = other DNA
ctgaaactggatatcccaac

SEQ ID NO: 18491-18499 - skipped (9 entries)

SEQ ID NO: 18500 - DNA, 20 bp, synthetic construct
  source 1..20: mol_type = other DNA
ttaaaggtacgacaccacag

SEQ ID NO: 18501-18509 - skipped (9 entries)

SEQ ID NO: 18510 - DNA, 20 bp, synthetic construct
  source 1..20: mol_type = other DNA
ttatttatacccatcaacac

SEQ ID NO: 18511-18519 - skipped (9 entries)

SEQ ID NO: 18520 - DNA, 20 bp, synthetic construct
  source 1..20: mol_type = other DNA
atctccttgatcagctgaaa

SEQ ID NO: 18521-18529 - skipped (9 entries)

SEQ ID NO: 18530 - DNA, 20 bp, synthetic construct
  source 1..20: mol_type = other DNA
caacaaagaagagacaattc

SEQ ID NO: 18531-18539 - skipped (9 entries)

SEQ ID NO: 18540 - DNA, 20 bp, synthetic construct
  source 1..20: mol_type = other DNA
ttaggatgtggatgtagaag

SEQ ID NO: 18541-18549 - skipped (9 entries)

SEQ ID NO: 18550 - DNA, 20 bp, synthetic construct
  source 1..20: mol_type = other DNA
ggatgtagaagaggcagttc

SEQ ID NO: 18551-18559 - skipped (9 entries)

SEQ ID NO: 18560 - DNA, 20 bp, synthetic construct
  source 1..20: mol_type = other DNA
gatgtagaagaggcagttct

SEQ ID NO: 18561-18569 - skipped (9 entries)

SEQ ID NO: 18570 - DNA, 20 bp, synthetic construct
  source 1..20: mol_type = other DNA
atgtagaagaggcagttctg

SEQ ID NO: 18571-18579 - skipped (9 entries)

SEQ ID NO: 18580 - DNA, 20 bp, synthetic construct
  source 1..20: mol_type = other DNA
caagagccatctgtagatgc

SEQ ID NO: 18581-18589 - skipped (9 entries)

SEQ ID NO: 18590 - DNA, 20 bp, synthetic construct
  source 1..20: mol_type = other DNA
gccatctgtagatgctggtg

SEQ ID NO: 18591-18599 - skipped (9 entries)

SEQ ID NO: 18600 - DNA, 20 bp, synthetic construct
  source 1..20: mol_type = other DNA
ggtgtggattgttcatcaat

SEQ ID NO: 18601-18609 - skipped (9 entries)

SEQ ID NO: 18610 - DNA, 20 bp, synthetic construct
  source 1..20: mol_type = other DNA
gtggattgttcatcaattgg

SEQ ID NO: 18611-18619 - skipped (9 entries)

SEQ ID NO: 18620 - DNA, 20 bp, synthetic construct
  source 1..20: mol_type = other DNA
tggattgttcatcaattggc

SEQ ID NO: 18621-18629 - skipped (9 entries)

SEQ ID NO: 18630 - DNA, 20 bp, synthetic construct
  source 1..20: mol_type = other DNA
ggattgttcatcaattggcg

SEQ ID NO: 18631-18639 - skipped (9 entries)

SEQ ID NO: 18640 - DNA, 20 bp, synthetic construct
  source 1..20: mol_type = other DNA
tggcggggttccatttttcc

SEQ ID NO: 18641-18649 - skipped (9 entries)

SEQ ID NO: 18650 - DNA, 20 bp, synthetic construct
  source 1..20: mol_type = other DNA
ccacagcataaaaaatcaca

SEQ ID NO: 18651-18659 - skipped (9 entries)

SEQ ID NO: 18660 - DNA, 20 bp, synthetic construct
  source 1..20: mol_type = other DNA
ggaaaagacaaagaaaacag

SEQ ID NO: 18661-18669 - skipped (9 entries)

SEQ ID NO: 18670 - DNA, 20 bp, synthetic construct
  source 1..20: mol_type = other DNA
aaacagaggcattaacacac

SEQ ID NO: 18671-18679 - skipped (9 entries)

SEQ ID NO: 18680 - DNA, 20 bp, synthetic construct
  source 1..20: mol_type = other DNA
gaggcattaacacactggag

SEQ ID NO: 18681-18689 - skipped (9 entries)

SEQ ID NO: 18690 - DNA, 20 bp, synthetic construct
  source 1..20: mol_type = other DNA
cacactggagaggtctaaag

SEQ ID NO: 18691-18699 - skipped (9 entries)

SEQ ID NO: 18700 - DNA, 20 bp, synthetic construct
  source 1..20: mol_type = other DNA
ggaagaaactacagagcact

SEQ ID NO: 18701-18709 - skipped (9 entries)

SEQ ID NO: 18710 - DNA, 20 bp, synthetic construct
  source 1..20: mol_type = other DNA
cttagtcaaaccaattttta

SEQ ID NO: 18711-18719 - skipped (9 entries)

SEQ ID NO: 18720 - DNA, 20 bp, synthetic construct
  source 1..20: mol_type = other DNA
tctcttttaaagtacctgtt

SEQ ID NO: 18721-18729 - skipped (9 entries)

SEQ ID NO: 18730 - DNA, 20 bp, synthetic construct
  source 1..20: mol_type = other DNA
ttctcttttaaagtacctgt

SEQ ID NO: 18731-18739 - skipped (9 entries)

SEQ ID NO: 18740 - DNA, 20 bp, synthetic construct
  source 1..20: mol_type = other DNA
tataaataacttttcctctg

SEQ ID NO: 18741-18749 - skipped (9 entries)

SEQ ID NO: 18750 - DNA, 20 bp, synthetic construct
  source 1..20: mol_type = other DNA
cagttcttaccagtgttgat

SEQ ID NO: 18751-18759 - skipped (9 entries)

SEQ ID NO: 18760 - DNA, 20 bp, synthetic construct
  source 1..20: mol_type = other DNA
tcagttcttaccagtgttga

SEQ ID NO: 18761-18769 - skipped (9 entries)

SEQ ID NO: 18770 - DNA, 20 bp, synthetic construct
  source 1..20: mol_type = other DNA
tgatcaaggagatgttcacg

SEQ ID NO: 18771-18779 - skipped (9 entries)

SEQ ID NO: 18780 - DNA, 20 bp, synthetic construct
  source 1..20: mol_type = other DNA
gtttccttttcagctgatca

SEQ ID NO: 18781-18789 - skipped (9 entries)

SEQ ID NO: 18790 - DNA, 20 bp, synthetic construct
  source 1..20: mol_type = other DNA
tttagcatcattaacagctc

SEQ ID NO: 18791-18799 - skipped (9 entries)

SEQ ID NO: 18800 - DNA, 20 bp, synthetic construct
  source 1..20: mol_type = other DNA
acagatggctcttgacttag

SEQ ID NO: 18801-18809 - skipped (9 entries)

SEQ ID NO: 18810 - DNA, 20 bp, synthetic construct
  source 1..20: mol_type = other DNA
tccacaccagcatctacaga

SEQ ID NO: 18811-18819 - skipped (9 entries)

SEQ ID NO: 18820 - DNA, 20 bp, synthetic construct
  source 1..20: mol_type = other DNA
atatgacatacctggaaaaa

SEQ ID NO: 18821-18829 - skipped (9 entries)

SEQ ID NO: 18830 - DNA, 20 bp, synthetic construct
  source 1..20: mol_type = other DNA
aggttgatctgggctcgcag

SEQ ID NO: 18831-18839 - skipped (9 entries)

SEQ ID NO: 18840 - DNA, 20 bp, synthetic construct
  source 1..20: mol_type = other DNA
agtgaattaaaggttgatct

SEQ ID NO: 18841-18849 - skipped (9 entries)

SEQ ID NO: 18850 - DNA, 20 bp, synthetic construct
  source 1..20: mol_type = other DNA
aagtgaattaaaggttgatc

SEQ ID NO: 18851 - DNA, 78 bp, synthetic construct
  source 1..78: mol_type = other DNA
tctggcggaggaagcggaggcggaggatctggtggtggtggatctggcggcggtggtagtggcggaggttctctgcaa

SEQ ID NO: 18852 - DNA, 20 bp, synthetic construct
  source 1..20: mol_type = other DNA
caggacgatgtgcagcggcc

SEQ ID NO: 18853 - DNA, 20 bp, synthetic construct
  source 1..20: mol_type = other DNA
accgcacgttcagaagtcgg

SEQ ID NO: 18854 - DNA, 20 bp, synthetic construct
  source 1..20: mol_type = other DNA
acaactgtgtaaattttgtg

SEQ ID NO: 18855 - DNA, 20 bp, synthetic construct
  source 1..20: mol_type = other DNA
caactgtgtaaattttgtga

SEQ ID NO: 18856 - DNA, 20 bp, synthetic construct
  source 1..20: mol_type = other DNA
acctgtgacaaccagaaatc

SEQ ID NO: 18857 - DNA, 20 bp, synthetic construct
  source 1..20: mol_type = other DNA
cctgtgacaaccagaaatcc

SEQ ID NO: 18858 - DNA, 20 bp, synthetic construct
  source 1..20: mol_type = other DNA
tgtggcttctcacagatgga

SEQ ID NO: 18859 - DNA, 20 bp, synthetic construct
  source 1..20: mol_type = other DNA
tctgtgagaagccacaggaa

SEQ ID NO: 18860 - DNA, 20 bp, synthetic construct
  source 1..20: mol_type = other DNA
aagctcccctaccatgactt

SEQ ID NO: 18861 - DNA, 20 bp, synthetic construct
  source 1..20: mol_type = other DNA
gaataaagtcatggtagggg

SEQ ID NO: 18862 - DNA, 20 bp, synthetic construct
  source 1..20: mol_type = other DNA
agaataaagtcatggtaggg

SEQ ID NO: 18863 - DNA, 20 bp, synthetic construct
  source 1..20: mol_type = other DNA
ctaccatgactttattctgg

SEQ ID NO: 18864 - DNA, 20 bp, synthetic construct
  source 1..20: mol_type = other DNA
taccatgactttattctgga

SEQ ID NO: 18865 - DNA, 20 bp, synthetic construct
  source 1..20: mol_type = other DNA
taatgcactttggagaagca

SEQ ID NO: 18866 - DNA, 20 bp, synthetic construct
  source 1..20: mol_type = other DNA
ttcataatgcactttggaga

SEQ ID NO: 18867 - DNA, 20 bp, synthetic construct
  source 1..20: mol_type = other DNA
aagtgcattatgaaggaaaa

SEQ ID NO: 18868 - DNA, 20 bp, synthetic construct
  source 1..20: mol_type = other DNA
tgtgttcctgtagctctgat

SEQ ID NO: 18869 - DNA, 20 bp, synthetic construct
  source 1..20: mol_type = other DNA
tgtagctctgatgagtgcaa

SEQ ID NO: 18870 - DNA, 20 bp, synthetic construct
  source 1..20: mol_type = other DNA
agtgacaggcatcagcctcc

SEQ ID NO: 18871 - DNA, 20 bp, synthetic construct
  source 1..20: mol_type = other DNA
agtggtggcaggaggctgat

SEQ ID NO: 18872 - DNA, 20 bp, synthetic construct
  source 1..20: mol_type = other DNA
aggttgaactcagcttctgc

SEQ ID NO: 18873 - DNA, 20 bp, synthetic construct
  source 1..20: mol_type = other DNA
caggttgaactcagcttctg

SEQ ID NO: 18874 - DNA, 20 bp, synthetic construct
  source 1..20: mol_type = other DNA
acctgggaaaccggcaagac

SEQ ID NO: 18875 - DNA, 20 bp, synthetic construct
  source 1..20: mol_type = other DNA
cgtcttgccggtttcccagg

SEQ ID NO: 18876 - DNA, 20 bp, synthetic construct
  source 1..20: mol_type = other DNA
gcgtcttgccggtttcccag

SEQ ID NO: 18877 - DNA, 20 bp, synthetic construct
  source 1..20: mol_type = other DNA
tgagcttccgcgtcttgccg

SEQ ID NO: 18878 - DNA, 20 bp, synthetic construct
  source 1..20: mol_type = other DNA
gcgagcactgtgccatcatc

SEQ ID NO: 18879 - DNA, 20 bp, synthetic construct
  source 1..20: mol_type = other DNA
ggatgatggcacagtgctcg

SEQ ID NO: 18880 - DNA, 20 bp, synthetic construct
  source 1..20: mol_type = other DNA
aggatgatggcacagtgctc

SEQ ID NO: 18881 - DNA, 20 bp, synthetic construct
  source 1..20: mol_type = other DNA
cgtgtgccaacaacatcaac

SEQ ID NO: 18882 - DNA, 20 bp, synthetic construct
  source 1..20: mol_type = other DNA
gctcaatgggcagcagctct

SEQ ID NO: 18883 - DNA, 20 bp, synthetic construct
  source 1..20: mol_type = other DNA
accagggtgtccagctcaat

SEQ ID NO: 18884 - DNA, 20 bp, synthetic construct
  source 1..20: mol_type = other DNA
caccagggtgtccagctcaa

SEQ ID NO: 18885 - DNA, 20 bp, synthetic construct
  source 1..20: mol_type = other DNA
ccaccagggtgtccagctca

SEQ ID NO: 18886 - DNA, 20 bp, synthetic construct
  source 1..20: mol_type = other DNA
gcttggccttatagacctca

SEQ ID NO: 18887 - DNA, 20 bp, synthetic construct
  source 1..20: mol_type = other DNA
gagcagtttgagacagtggc

SEQ ID NO: 18888 - DNA, 20 bp, synthetic construct
  source 1..20: mol_type = other DNA
agaggcatactcctcatagg

SEQ ID NO: 18889 - DNA, 20 bp, synthetic construct
  source 1..20: mol_type = other DNA
ctatgaggagtatgcctctt

SEQ ID NO: 18890 - DNA, 20 bp, synthetic construct
  source 1..20: mol_type = other DNA
aagaggcatactcctcatag

SEQ ID NO: 18891 - DNA, 20 bp, synthetic construct
  source 1..20: mol_type = other DNA
tatgaggagtatgcctcttg

SEQ ID NO: 18892 - DNA, 20 bp, synthetic construct
  source 1..20: mol_type = other DNA
gattgatgtctgagaagatg

SEQ ID NO: 18893 - DNA, 20 bp, synthetic construct
  source 1..20: mol_type = other DNA
ctcctcagccgtcaggaact

SEQ ID NO: 18894 - DNA, 20 bp, synthetic construct
  source 1..20: mol_type = other DNA
gttcctgacggctgaggagc

SEQ ID NO: 18895 - DNA, 20 bp, synthetic construct
  source 1..20: mol_type = other DNA
gctcctcagccgtcaggaac

SEQ ID NO: 18896 - DNA, 20 bp, synthetic construct
  source 1..20: mol_type = other DNA
tgacggctgaggagcggaag

SEQ ID NO: 18897 - DNA, 20 bp, synthetic construct
  source 1..20: mol_type = other DNA
tcttccgctcctcagccgtc

SEQ ID NO: 18898 - DNA, 20 bp, synthetic construct
  source 1..20: mol_type = other DNA
aactccgtcttccgctcctc

SEQ ID NO: 18899 - DNA, 20 bp, synthetic construct
  source 1..20: mol_type = other DNA
caactccgtcttccgctcct

SEQ ID NO: 18900 - DNA, 20 bp, synthetic construct
  source 1..20: mol_type = other DNA
ccaactccgtcttccgctcc

SEQ ID NO: 18901 - DNA, 20 bp, synthetic construct
  source 1..20: mol_type = other DNA
acgccaagggcaacctacag

SEQ ID NO: 18902 - DNA, 20 bp, synthetic construct
  source 1..20: mol_type = other DNA
cgccaagggcaacctacagg

SEQ ID NO: 18903 - DNA, 20 bp, synthetic construct
  source 1..20: mol_type = other DNA
agctgatgacatgccgcgtc

SEQ ID NO: 18904 - DNA, 20 bp, synthetic construct
  source 1..20: mol_type = other DNA
gggcgagggagctgcccagc

SEQ ID NO: 18905 - DNA, 20 bp, synthetic construct
  source 1..20: mol_type = other DNA
cgggcgagggagctgcccag

SEQ ID NO: 18906 - DNA, 20 bp, synthetic construct
  source 1..20: mol_type = other DNA
ccgggcgagggagctgccca

SEQ ID NO: 18907 - DNA, 20 bp, synthetic construct
  source 1..20: mol_type = other DNA
tcgcccgggggattgctcac

SEQ ID NO: 18908 - DNA, 20 bp, synthetic construct
  source 1..20: mol_type = other DNA
acatggagtgtgatcactgt

SEQ ID NO: 18909 - DNA, 20 bp, synthetic construct
  source 1..20: mol_type = other DNA
cagtgatcacactccatgtg

SEQ ID NO: 18910 - DNA, 20 bp, synthetic construct
  source 1..20: mol_type = other DNA
tgtgggaggcccaagatgcc

SEQ ID NO: 18911 - DNA, 20 bp, synthetic construct
  source 1..20: mol_type = other DNA
tgtgcacgatgggcatcttg

SEQ ID NO: 18912 - DNA, 20 bp, synthetic construct
  source 1..20: mol_type = other DNA
cgaggatattggagctcttg

SEQ ID NO: 18913 - DNA, 20 bp, synthetic construct
  source 1..20: mol_type = other DNA
atatcctcgtgaagaacgac

SEQ ID NO: 18914 - DNA, 20 bp, synthetic construct
  source 1..20: mol_type = other DNA
gacgcagggaaagcccaaag

SEQ ID NO: 18915 - DNA, 20 bp, synthetic construct
  source 1..20: mol_type = other DNA
ctgcgtctggaccctactct

SEQ ID NO: 18916 - DNA, 20 bp, synthetic construct
  source 1..20: mol_type = other DNA
tgcgtctggaccctactctg

SEQ ID NO: 18917 - DNA, 20 bp, synthetic construct
  source 1..20: mol_type = other DNA
cagacagagtagggtccaga

SEQ ID NO: 18918 - DNA, 20 bp, synthetic construct
  source 1..20: mol_type = other DNA
gccagcacgatcccaccgca

SEQ ID NO: 18919 - DNA, 20 bp, synthetic construct
  source 1..20: mol_type = other DNA
aaggaaaaaaaaaagcctgg

SEQ ID NO: 18920 - DNA, 20 bp, synthetic construct
  source 1..20: mol_type = other DNA
acaccagcaatcctgacttg

SEQ ID NO: 18921 - DNA, 20 bp, synthetic construct
  source 1..20: mol_type = other DNA
actagcaacaagtcaggatt

SEQ ID NO: 18922 - DNA, 20 bp, synthetic construct
  source 1..20: mol_type = other DNA
gcaactcccagtggtggcag

SEQ ID NO: 18923 - DNA, 20 bp, synthetic construct
  source 1..20: mol_type = other DNA
tgtcatcatcatcttctact

SEQ ID NO: 18924 - DNA, 20 bp, synthetic construct
  source 1..20: mol_type = other DNA
gacctcagcaaagcgacctt

SEQ ID NO: 18925 - DNA, 20 bp, synthetic construct
  source 1..20: mol_type = other DNA
aggccaagctgaagcagaac

SEQ ID NO: 18926 - DNA, 20 bp, synthetic construct
  source 1..20: mol_type = other DNA
aggagtatgcctcttggaag

SEQ ID NO: 18927 - DNA, 20 bp, synthetic construct
  source 1..20: mol_type = other DNA
cctcttggaagacagagaag

SEQ ID NO: 18928 - DNA, 20 bp, synthetic construct
  source 1..20: mol_type = other DNA
ttctcatgcttcagattgat

SEQ ID NO: 18929 - DNA, 20 bp, synthetic construct
  source 1..20: mol_type = other DNA
ctcgtgaagaacgacctaac

SEQ ID NO: 18930 - DNA, 20 bp, synthetic construct
  source 1..20: mol_type = other DNA
ggccgctgcacatcgtcctg

SEQ ID NO: 18931 - DNA, 20 bp, synthetic construct
  source 1..20: mol_type = other DNA
gcggggtctgccatgggtcg

SEQ ID NO: 18932 - DNA, 20 bp, synthetic construct
  source 1..20: mol_type = other DNA
agttgctcatgcaggatttc

SEQ ID NO: 18933 - DNA, 20 bp, synthetic construct
  source 1..20: mol_type = other DNA
ccagaataaagtcatggtag

SEQ ID NO: 18934 - DNA, 20 bp, synthetic construct
  source 1..20: mol_type = other DNA
cccctaccatgactttattc

SEQ ID NO: 18935 - DNA, 20 bp, synthetic construct
  source 1..20: mol_type = other DNA
aagtcatggtaggggagctt

SEQ ID NO: 18936 - DNA, 20 bp, synthetic construct
  source 1..20: mol_type = other DNA
agtcatggtaggggagcttg

SEQ ID NO: 18937 - DNA, 20 bp, synthetic construct
  source 1..20: mol_type = other DNA
attgcactcatcagagctac

SEQ ID NO: 18938 - DNA, 20 bp, synthetic construct
  source 1..20: mol_type = other DNA
cctagagtgaagagattcat

SEQ ID NO: 18939 - DNA, 20 bp, synthetic construct
  source 1..20: mol_type = other DNA
ccaatgaatctcttcactct

SEQ ID NO: 18940 - DNA, 20 bp, synthetic construct
  source 1..20: mol_type = other DNA
aaagtcatggtaggggagct

SEQ ID NO: 18941 - DNA, 20 bp, synthetic construct
  source 1..20: mol_type = other DNA
gtgagcaatcccccgggcga

SEQ ID NO: 18942 - DNA, 20 bp, synthetic construct
  source 1..20: mol_type = other DNA
gtcgttcttcacgaggatat

SEQ ID NO: 18943 - DNA, 20 bp, synthetic construct
  source 1..20: mol_type = other DNA
gccgcgtcaggtactcctgt

SEQ ID NO: 18944 - DNA, 20 bp, synthetic construct
  source 1..20: mol_type = other DNA
gacgcggcatgtcatcagct

SEQ ID NO: 18945 - DNA, 20 bp, synthetic construct
  source 1..20: mol_type = other DNA
gcttctgctgccggttaacg

SEQ ID NO: 18946 - DNA, 20 bp, synthetic construct
  source 1..20: mol_type = other DNA
gtggatgacctggctaacag

SEQ ID NO: 18947 - DNA, 20 bp, synthetic construct
  source 1..20: mol_type = other DNA
gtgatcacactccatgtggg

SEQ ID NO: 18948 - DNA, 20 bp, synthetic construct
  source 1..20: mol_type = other DNA
gcccattgagctggacaccc

SEQ ID NO: 18949 - DNA, 20 bp, synthetic construct
  source 1..20: mol_type = other DNA
gcggtcatcttccaggatga

SEQ ID NO: 18950 - DNA, 20 bp, synthetic construct
  source 1..20: mol_type = other DNA
gggagctgcccagcttgcgc

SEQ ID NO: 18951 - DNA, 20 bp, synthetic construct
  source 1..20: mol_type = other DNA
gttgatgttgttggcacacg

SEQ ID NO: 18952 - DNA, 20 bp, synthetic construct
  source 1..20: mol_type = other DNA
ggcatcttgggcctcccaca

SEQ ID NO: 18953 - DNA, 20 bp, synthetic construct
  source 1..20: mol_type = other DNA
gcggcatgtcatcagctggg

SEQ ID NO: 18954 - DNA, 132 bp, unidentified
  source 1..132: mol_type = unassigned DNA
tcaagctcatttcctggtatgtggctggggccagagactggctcttaaaaagtgcagggtctggcgccctctggtggctggctcagaaaaagggccctgacaactcttttcatcttctaggtatgacaacga

SEQ ID NO: 18955 - DNA, 20 bp, synthetic construct
  source 1..20: mol_type = other DNA
ctgtggcttctcacagatgg

SEQ ID NO: 18956 - DNA, 20 bp, synthetic construct
  source 1..20: mol_type = other DNA
tcacaaaatttacacagttg

SEQ ID NO: 18957 - DNA, 20 bp, synthetic construct
  source 1..20: mol_type = other DNA
tccagaataaagtcatggta

SEQ ID NO: 18958 - DNA, 20 bp, synthetic construct
  source 1..20: mol_type = other DNA
ggtaggggagcttggggtca

SEQ ID NO: 18959 - DNA, 20 bp, synthetic construct
  source 1..20: mol_type = other DNA
ttctccaaagtgcattatga

SEQ ID NO: 18960 - DNA, 20 bp, synthetic construct
  source 1..20: mol_type = other DNA
catcttccagaataaagtca

SEQ ID NO: 18961 - DNA, 20 bp, synthetic construct
  source 1..20: mol_type = other DNA
cacatgaagaaagtctcacc

SEQ ID NO: 18962 - DNA, 20 bp, synthetic construct
  source 1..20: mol_type = other DNA
ttccagaataaagtcatggt

SEQ ID NO: 18963 - DNA, 20 bp, synthetic construct
  source 1..20: mol_type = other DNA
ttttccttcataatgcactt

SEQ ID NO: 18964 - DNA, 20 bp, synthetic construct
  source 1..20: mol_type = other DNA
cacagttgtggaaacttgac

SEQ ID NO: 18965 - DNA, 20 bp, synthetic construct
  source 1..20: mol_type = other DNA
cccaactccgtcttccgctc

SEQ ID NO: 18966 - DNA, 20 bp, synthetic construct
  source 1..20: mol_type = other DNA
ggctttccctgcgtctggac

SEQ ID NO: 18967 - DNA, 20 bp, synthetic construct
  source 1..20: mol_type = other DNA
ctgaggtctataaggccaag

SEQ ID NO: 18968 - DNA, 20 bp, synthetic construct
  source 1..20: mol_type = other DNA
tgatgtgagattttccacct

SEQ ID NO: 18969 - DNA, 20 bp, synthetic construct
  source 1..20: mol_type = other DNA
cctatgaggagtatgcctct

SEQ ID NO: 18970 - DNA, 20 bp, synthetic construct
  source 1..20: mol_type = other DNA
aagtgacaggcatcagcctc

SEQ ID NO: 18971 - DNA, 20 bp, synthetic construct
  source 1..20: mol_type = other DNA
ccatgaccccaagctcccct

SEQ ID NO: 18972 - DNA, 20 bp, synthetic construct
  source 1..20: mol_type = other DNA
cttcataatgcactttggag

SEQ ID NO: 18973 - DNA, 20 bp, synthetic construct
  source 1..20: mol_type = other DNA
ttcatgtgttcctgtagctc

SEQ ID NO: 18974 - DNA, 20 bp, synthetic construct
  source 1..20: mol_type = other DNA
ttctggaagatgctgcttct

SEQ ID NO: 18975 - DNA, 20 bp, synthetic construct
  source 1..20: mol_type = other DNA
cccaccagggtgtccagctc

SEQ ID NO: 18976 - DNA, 20 bp, synthetic construct
  source 1..20: mol_type = other DNA
agacagtggcagtcaagatc

SEQ ID NO: 18977 - DNA, 20 bp, synthetic construct
  source 1..20: mol_type = other DNA
cctgcgtctggaccctactc

SEQ ID NO: 18978 - DNA, 20 bp, synthetic construct
  source 1..20: mol_type = other DNA
cacaactgtgtaaattttgt

SEQ ID NO: 18979 - DNA, 20 bp, synthetic construct
  source 1..20: mol_type = other DNA
gagaagcagcatcttccaga

SEQ ID NO: 18980 - DNA, 20 bp, synthetic construct
  source 1..20: mol_type = other DNA
tggttgtcacaggtggaaaa

SEQ ID NO: 18981 - DNA, 20 bp, synthetic construct
  source 1..20: mol_type = other DNA
ccaggttgaactcagcttct

SEQ ID NO: 18982 - DNA, 21 bp, synthetic construct
  source 1..21: mol_type = other DNA
atcacaaaatttacacagttg

SEQ ID NO: 18983 - DNA, 21 bp, synthetic construct
  source 1..21: mol_type = other DNA
ggcatcagcctcctgccacca

SEQ ID NO: 18984 - DNA, 21 bp, synthetic construct
  source 1..21: mol_type = other DNA
gttagccaggtcatccacaga

SEQ ID NO: 18985 - DNA, 21 bp, synthetic construct
  source 1..21: mol_type = other DNA
gctgggcagctccctcgcccg

SEQ ID NO: 18986 - DNA, 21 bp, synthetic construct
  source 1..21: mol_type = other DNA
caggaggctgatgcctgtcac

SEQ ID NO: 18987 - DNA, 21 bp, synthetic construct
  source 1..21: mol_type = other DNA
gaggagcggaagacggagttg

SEQ ID NO: 18988 - DNA, 21 bp, synthetic construct
  source 1..21: mol_type = other DNA
cgtctggaccctactctgtct

SEQ ID NO: 18989 - DNA, 21 bp, synthetic construct
  source 1..21: mol_type = other DNA
tttttccttcataatgcactt

SEQ ID NO: 18990 - DNA, 21 bp, synthetic construct
  source 1..21: mol_type = other DNA
ccattgagctggacaccctgg

SEQ ID NO: 18991 - DNA, 21 bp, synthetic construct
  source 1..21: mol_type = other DNA
cttctccaaagtgcattatga

SEQ ID NO: 18992 - DNA, 21 bp, synthetic construct
  source 1..21: mol_type = other DNA
gcccaagatgcccatcgtgca

SEQ ID NO: 18993 - DNA, 21 bp, synthetic construct
  source 1..21: mol_type = other DNA
tcatgtgttcctgtagctctg

SEQ ID NO: 18994 - DNA, 21 bp, synthetic construct
  source 1..21: mol_type = other DNA
gtgatgctgcagttgctcatg

SEQ ID NO: 18995 - DNA, 21 bp, synthetic construct
  source 1..21: mol_type = other DNA
tctcatgcttcagattgatgt

SEQ ID NO: 18996 - DNA, 21 bp, synthetic construct
  source 1..21: mol_type = other DNA
tccctatgaggagtatgcctc

SEQ ID NO: 18997 - DNA, 21 bp, synthetic construct
  source 1..21: mol_type = other DNA
catcacaaaatttacacagtt

SEQ ID NO: 18998 - DNA, 21 bp, synthetic construct
  source 1..21: mol_type = other DNA
attgagctggacaccctggtg

SEQ ID NO: 18999 - DNA, 21 bp, synthetic construct
  source 1..21: mol_type = other DNA
cagtcaagatctttccctatg

SEQ ID NO: 19000 - DNA, 21 bp, synthetic construct
  source 1..21: mol_type = other DNA
aggatttctggttgtcacagg

SEQ ID NO: 19001 - DNA, 21 bp, synthetic construct
  source 1..21: mol_type = other DNA
tccacagtgatcacactccat

SEQ ID NO: 19002 - DNA, 21 bp, synthetic construct
  source 1..21: mol_type = other DNA
agcagaacacttcagagcagt

SEQ ID NO: 19003 - DNA, 21 bp, synthetic construct
  source 1..21: mol_type = other DNA
ccggcaagacgcggaagctca

SEQ ID NO: 19004 - DNA, 21 bp, synthetic construct
  source 1..21: mol_type = other DNA
gatgtcagagcggtcatcttc

SEQ ID NO: 19005 - DNA, 21 bp, synthetic construct
  source 1..21: mol_type = other DNA
tcattgcactcatcagagcta

SEQ ID NO: 19006 - DNA, 21 bp, synthetic construct
  source 1..21: mol_type = other DNA
cttccagaataaagtcatggt

SEQ ID NO: 19007 - DNA, 21 bp, synthetic construct
  source 1..21: mol_type = other DNA
agattttccacctgtgacaac

SEQ ID NO: 19008 - DNA, 21 bp, synthetic construct
  source 1..21: mol_type = other DNA
actgcagcatcacctccatct

SEQ ID NO: 19009 - DNA, 21 bp, synthetic construct
  source 1..21: mol_type = other DNA
agctgggcagctccctcgccc

SEQ ID NO: 19010 - DNA, 21 bp, synthetic construct
  source 1..21: mol_type = other DNA
tgacggctgaggagcggaaga

SEQ ID NO: 19011 - DNA, 21 bp, synthetic construct
  source 1..21: mol_type = other DNA
cattgagctggacaccctggt

SEQ ID NO: 19012 - DNA, 21 bp, synthetic construct
  source 1..21: mol_type = other DNA
agcaaagcgacctttccccac

SEQ ID NO: 19013 - DNA, 21 bp, synthetic construct
  source 1..21: mol_type = other DNA
cgcgttaaccggcagcagaag

SEQ ID NO: 19014 - DNA, 21 bp, synthetic construct
  source 1..21: mol_type = other DNA
gaaatatgactagcaacaagt

SEQ ID NO: 19015 - RNA, 5000 nt, synthetic construct
  source 1..5000: mol_type = other RNA
  misc_difference 1..5000: note = This sequence may encompass 50, 60, 70, 100, 200, 500, 1000, 2000, 3000, 4000, or 5000 nucleotides
aaaaaaaaaaaaaaaaaaaaaaaaaaaaaaaaaaaaaaaaaaaaaaaaaaaaaaaaaaaaaaaaaaaaaaaaaaaaaaaaaaaaaaaaaaaaaaaaaaaaaaaaaaaaaaaaaaaaaaaaaaaaaaaaaaaaaaaaaaaaaaaaaaaaaaaaaaaaaaaaaaaaaaaaaaaaaaaaaaaaaaaaaaaaaaaaaaaaaaaaaaaaaaaaaaaaaaaaaaaaaaaaaaaaaaaaaaaaaaaaaaaaaaaaaaaaaaaaaaaaaaaaaaaaaaaaaaaaaaaaaaaaaaaaaaaaaaaaaaaaaaaaaaaaaaaaaaaaaaaaaaaaaaaaaaaaaaaaaaaaaaaaaaaaaaaaaaaaaaaaaaaaaaaaaaaaaaaaaaaaaaaaaaaaaaaaaaaaaaaaaaaaaaaaaaaaaaaaaaaaaaaaaaaaaaaaaaaaaaaaaaaaaaaaaaaaaaaaaaaaaaaaaaaaaaaaaaaaaaaaaaaaaaaaaaaaaaaaaaaaaaaaaaaaaaaaaaaaaaaaaaaaaaaaaaaaaaaaaaaaaaaaaaaaaaaaaaaaaaaaaaaaaaaaaaaaaaaaaaaaaaaaaaaaaaaaaaaaaaaaaaaaaaaaaaaaaaaaaaaaaaaaaaaaaaaaaaaaaaaaaaaaaaaaaaaaaaaaaaaaaaaaaaaaaaaaaaaaaaaaaaaaaaaaaaaaaaaaaaaaaaaaaaaaaaaaaaaaaaaaaaaaaaaaaaaaaaaaaaaaaaaaaaaaaaaaaaaaaaaaaaaaaaaaaaaaaaaaaaaaaaaaaaaaaaaaaaaaaaaaaaaaaaaaaaaaaaaaaaaaaaaaaaaaaaaaaaaaaaaaaaaaaaaaaaaaaaaaaaaaaaaaaaaaaaaaaaaaaaaaaaaaaaaaaaaaaaaaaaaaaaaaaaaaaaaaaaaaaaaaaaaaaaaaaaaaaaaaaaaaaaaaaaaaaaaaaaaaaaaaaaaaaaaaaaaaaaaaaaaaaaaaaaaaaaaaaaaaaaaaaaaaaaaaaaaaaaaaaaaaaaaaaaaaaaaaaaaaaaaaaaaaaaaaaaaaaaaaaaaaaaaaaaaaaaaaaaaaaaaaaaaaaaaaaaaaaaaaaaaaaaaaaaaaaaaaaaaaaaaaaaaaaaaaaaaaaaaaaaaaaaaaaaaaaaaaaaaaaaaaaaaaaaaaaaaaaaaaaaaaaaaaaaaaaaaaaaaaaaaaaaaaaaaaaaaaaaaaaaaaaaaaaaaaaaaaaaaaaaaaaaaaaaaaaaaaaaaaaaaaaaaaaaaaaaaaaaaaaaaaaaaaaaaaaaaaaaaaaaaaaaaaaaaaaaaaaaaaaaaaaaaaaaaaaaaaaaaaaaaaaaaaaaaaaaaaaaaaaaaaaaaaaaaaaaaaaaaaaaaaaaaaaaaaaaaaaaaaaaaaaaaaaaaaaaaaaaaaaaaaaaaaaaaaaaaaaaaaaaaaaaaaaaaaaaaaaaaaaaaaaaaaaaaaaaaaaaaaaaaaaaaaaaaaaaaaaaaaaaaaaaaaaaaaaaaaaaaaaaaaaaaaaaaaaaaaaaaaaaaaaaaaaaaaaaaaaaaaaaaaaaaaaaaaaaaaaaaaaaaaaaaaaaaaaaaaaaaaaaaaaaaaaaaaaaaaaaaaaaaaaaaaaaaaaaaaaaaaaaaaaaaaaaaaaaaaaaaaaaaaaaaaaaaaaaaaaaaaaaaaaaaaaaaaaaaaaaaaaaaaaaaaaaaaaaaaaaaaaaaaaaaaaaaaaaaaaaaaaaaaaaaaaaaaaaaaaaaaaaaaaaaaaaaaaaaaaaaaaaaaaaaaaaaaaaaaaaaaaaaaaaaaaaaaaaaaaaaaaaaaaaaaaaaaaaaaaaaaaaaaaaaaaaaaaaaaaaaaaaaaaaaaaaaaaaaaaaaaaaaaaaaaaaaaaaaaaaaaaaaaaaaaaaaaaaaaaaaaaaaaaaaaaaaaaaaaaaaaaaaaaaaaaaaaaaaaaaaaaaaaaaaaaaaaaaaaaaaaaaaaaaaaaaaaaaaaaaaaaaaaaaaaaaaaaaaaaaaaaaaaaaaaaaaaaaaaaaaaaaaaaaaaaaaaaaaaaaaaaaaaaaaaaaaaaaaaaaaaaaaaaaaaaaaaaaaaaaaaaaaaaaaaaaaaaaaaaaaaaaaaaaaaaaaaaaaaaaaaaaaaaaaaaaaaaaaaaaaaaaaaaaaaaaaaaaaaaaaaaaaaaaaaaaaaaaaaaaaaaaaaaaaaaaaaaaaaaaaaaaaaaaaaaaaaaaaaaaaaaaaaaaaaaaaaaaaaaaaaaaaaaaaaaaaaaaaaaaaaaaaaaaaaaaaaaaaaaaaaaaaaaaaaaaaaaaaaaaaaaaaaaaaaaaaaaaaaaaaaaaaaaaaaaaaaaaaaaaaaaaaaaaaaaaaaaaaaaaaaaaaaaaaaaaaaaaaaaaaaaaaaaaaaaaaaaaaaaaaaaaaaaaaaaaaaaaaaaaaaaaaaaaaaaaaaaaaaaaaaaaaaaaaaaaaaaaaaaaaaaaaaaaaaaaaaaaaaaaaaaaaaaaaaaaaaaaaaaaaaaaaaaaaaaaaaaaaaaaaaaaaaaaaaaaaaaaaaaaaaaaaaaaaaaaaaaaaaaaaaaaaaaaaaaaaaaaaaaaaaaaaaaaaaaaaaaaaaaaaaaaaaaaaaaaaaaaaaaaaaaaaaaaaaaaaaaaaaaaaaaaaaaaaaaaaaaaaaaaaaaaaaaaaaaaaaaaaaaaaaaaaaaaaaaaaaaaaaaaaaaaaaaaaaaaaaaaaaaaaaaaaaaaaaaaaaaaaaaaaaaaaaaaaaaaaaaaaaaaaaaaaaaaaaaaaaaaaaaaaaaaaaaaaaaaaaaaaaaaaaaaaaaaaaaaaaaaaaaaaaaaaaaaaaaaaaaaaaaaaaaaaaaaaaaaaaaaaaaaaaaaaaaaaaaaaaaaaaaaaaaaaaaaaaaaaaaaaaaaaaaaaaaaaaaaaaaaaaaaaaaaaaaaaaaaaaaaaaaaaaaaaaaaaaaaaaaaaaaaaaaaaaaaaaaaaaaaaaaaaaaaaaaaaaaaaaaaaaaaaaaaaaaaaaaaaaaaaaaaaaaaaaaaaaaaaaaaaaaaaaaaaaaaaaaaaaaaaaaaaaaaaaaaaaaaaaaaaaaaaaaaaaaaaaaaaaaaaaaaaaaaaaaaaaaaaaaaaaaaaaaaaaaaaaaaaaaaaaaaaaaaaaaaaaaaaaaaaaaaaaaaaaaaaaaaaaaaaaaaaaaaaaaaaaaaaaaaaaaaaaaaaaaaaaaaaaaaaaaaaaaaaaaaaaaaaaaaaaaaaaaaaaaaaaaaaaaaaaaaaaaaaaaaaaaaaaaaaaaaaaaaaaaaaaaaaaaaaaaaaaaaaaaaaaaaaaaaaaaaaaaaaaaaaaaaaaaaaaaaaaaaaaaaaaaaaaaaaaaaaaaaaaaaaaaaaaaaaaaaaaaaaaaaaaaaaaaaaaaaaaaaaaaaaaaaaaaaaaaaaaaaaaaaaaaaaaaaaaaaaaaaaaaaaaaaaaaaaaaaaaaaaaaaaaaaaaaaaaaaaaaaaaaaaaaaaaaaaaaaaaaaaaaaaaaaaaaaaaaaaaaaaaaaaaaaaaaaaaaaaaaaaaaaaaaaaaaaaaaaaaaaaaaaaaaaaaaaaaaaaaaaaaaaaaaaaaaaaaaaaaaaaaaaaaaaaaaaaaaaaaaaaaaaaaaaaaaaaaaaaaaaaaaaaaaaaaaaaaaaaaaaaaaaaaaaaaaaaaaaaaaaaaaaaaaaaaaaaaaaaaaaaaaaaaaaaaaaaaaaaaaaaaaaaaaaaaaaaaaaaaaaaaaaaaaaaaaaaaaaaaaaaaaaaaaaaaaaaaaaaaaaaaaaaaaaaaaaaaaaaaaaaaaaaaaaaaaaaaaaaaaaaaaaaaaaaaaaaaaaaaaaaaaaaaaaaaaaaaaaaaaaaaaaaaaaaaaaaaaaaaaaaaaaaaaaaaaaaaaaaaaaaaaaaaaaaaaaaaaaaaaaaaaaaaaaaaaaaaaaaaaaaaaaaaaaaaaaaaaaaaaaaaaaaaaaaaaaaaaaaaaaaaaaaaaaaaaaaaaaaaaaaaaaaaaaaaaaaaaaaaaaaaaaaaaaaaaaaaaaaaaaaaaaaaaaaaaaaaaaaaaaaaaaaaaaaaaaaaaaaaaaaaaaaaaaaaaaaaaaaaaaaaaaaaaaaaaaaaaaaaaaaaaaaaaaaaaaaaaaaaaaaaaaaaaaaaaaaaaaaaaaaaaaaaaaaaaaaaaaaaaaaaaaaaaaaaaaaaaaaaaaaaaaaaaaaaaaaaaaaaaaaaaaaaaaaaaaaaaaaaaaaaaaaaaaaaaaaaaaaaaaaaaaaaaaaaaaaaaaaaaaaaaaaaaaaaaaaaaaaaaaaaaaaaaaaaaaaaaaaaaaaaaaaaaaaaaaaaaaaaaaaaaaaaaaaaaaaaaaaaaaaaaaaaaaaaaaaaaaaaaaaaaaaaaaaaaaaaaaaaaaaaaaaaaaaaaaaaaaaaaaaaaaaaaaaaaaaaaaaaaaaaaaaaaaaaaaaaaaaaaaaaaaaaaaaaaaaaaaaaaaaaaaaaaaaaaaaaaaaaaaaaaaaaaaaaaaaaaaaaaaaaaaaaaaaaaaaaaaaaaaaaaaaaaaaaaaaaaaaaaaaaaaaaaaaaaaaaaaaaaaaaaaaaaaaaaaaaaaaaaaaaaaaaaaaaaaaaaaaaaaaaaaaaaaaaaaaaaaaaaaaaaaaaaaaaaaaaaaaaaaaaaaaaaaaaaaaaaaaaaaaaaaaaaaaaaaaaaaaaaaaaaaaaaaaaaaaaaaaaaaaaaaaaaaaaaaaaaaaaaaaaaaaaaaaaaaaaaaaaaaaaaaaaaaaaaaaaaaaaaaaaaaaaaaaaaaaaaaaaaaaaaaaaaaaaaaaaaaaaaaaaaaaaaaaaaaaaaaaaaaaaaaaaaaaaaaaaaaaaaaaaaaaaaaaaaaaaaaaaaaaaaaaaaaaaaaaaaaaaaaaaaaaaaaaaaaaaaaaaaaaaaaaaaaaaaaaaaaaaaaaaaaaaaaaaaaaaaaaaaaaaaaaaaaaaaaaaaaaaaaaa

SEQ ID NO: 19016 - DNA, 17 bp, synthetic construct
  source 1..17: mol_type = other DNA
aaataaaatacgaaatg

SEQ ID NO: 19017 - RNA, 41 nt, synthetic construct
  source 1..41: mol_type = other RNA
  misc_difference 21: note = a, c, g or u
  misc_difference 22: note = a, c, g or u
  misc_difference 23: note = a, c, g or u
  misc_difference 24: note = a, c, g or u
  misc_difference 25: note = a, c, g or u
  misc_difference 26: note = a, c, g or u
  misc_difference 27: note = a, c, g or u
  misc_difference 28: note = a, c, g or u
  misc_difference 29: note = a, c, g or u
  misc_difference 30: note = a, c, g or u
  misc_difference 31: note = a, c, g or u
  misc_difference 32: note = a, c, g or u
  misc_difference 33: note = a, c, g or u
  misc_difference 34: note = a, c, g or u
  misc_difference 35: note = a, c, g or u
  misc_difference 36: note = a, c, g or u
  misc_difference 37: note = a, c, g or u
  misc_difference 38: note = a, c, g or u
  misc_difference 39: note = a, c, g or u
  misc_difference 40: note = a, c, g or u
  misc_difference 41: note = a, c, g or u
taatttctactcttgtagatnnnnnnnnnnnnnnnnnnnnn

SEQ ID NO: 19018 - DNA, 2595 bp, synthetic construct
  source 1..2595: mol_type = other DNA
acgcgtattgggatgaagactgtggatggcccctccgggaaactgtggcgtgatggccgcggggctctccagaacatcatccctgcctctactggcgctgccaaggctgtgggcaaggtcatccctgagctgaacgggaagctcactggcatggccttccgtgtccccactgccaacgtgtcagtggtggacctgacctgccgtctagaaaaacctgccaaatatgatgacatcaagaaggtggtgaagcaggcgtcggagggccccctcaagggcatcctgggctacactgagcaccaggtggtctcctctgacttcaacagcgacacccactcctccacctttgacgctggggctggcattgccctcaacgaccactttgtcaagctcatttcctggtatgtggctggggccagagactggctcttaaaaagtgcagggtctggcgccctctggtggctggctcagaaaaagggccctgacaactctttacatcttctaggtatgacaacgagttcggatatagcaatagagtggtcgatctgatggctcatatggctagcaaagagggaagcggagctactaacttcagcctgctgaagcaggctggagacgtggaggagaaccctggacctatggtgagcaagggcgaggagctgttcaccggggtggtgcccatcctggtcgagctggacggcgacgtaaacggccacaagttcagcgtgtccggcgagggcgagggcgatgccacctacggcaagctgaccctgaagttcatctgcaccaccggcaagctgcccgtgccctggcccaccctcgtgaccaccctgacctacggcgtgcagtgcttcagccgctaccccgaccacatgaagcagcacgacttcttcaagtccgccatgcccgaaggctacgtccaggagcgcaccatcttcttcaaggacgacggcaactacaagacccgcgccgaggtgaagttcgagggcgacaccctggtgaaccgcatcgagctgaagggcatcgacttcaaggaggacggcaacatcctggggcacaagctggagtacaactacaacagccacaacgtctatatcatggccgacaagcagaagaacggcatcaaggtgaacttcaagatccgccacaacatcgaggacggcagcgtgcagctcgccgaccactaccagcagaacacccccatcggcgacggccccgtgctgctgcccgacaaccactacctgagcacccagtccgccctgagcaaagaccccaacgagaagcgcgatcacatggtcctgctggagttcgtgaccgccgccgggatcactctcggcatggacgagctgtacaagtgagcggccgcgtcgagtctagagggcccgtttaaacccgctgatcagcctcgactgtgccttctagttgccagccatctgttgtttgcccctcccccgtgccttccttgaccctggaaggtgccactcccactgtcctttcctaataaaatgaggaaattgcatcgcattgtctgagtaggtgtcattctattctggggggtggggtggggcaggacagcaagggggaggattgggaagacaatagcaggcatgctggggatgcggtgggctctatggatttggctacagcaacagggtggtggacctcatggcccacatggcctccaaggagtaagacccctggaccaccagccccagcaagagcacaagaggaagagagagaccctcactgctggggagtccctgccacactcagtcccccaccacactgaatctcccctcctcacagttgccatgtagaccccttgaagaggggaggggcctagggagccgcaccttgtcatgtaccatcaataaagtaccctgtgctcaaccagttacttgtcctgtcttattctagggtctggggcagaggggagggaagctgggcttgtgtcaaggtgagacattcttgctggggagggacctggtatgttctcctcagactgagggtagggcctccaaacagccttgcttgcttcgagaaccatttgcttcccgctcagacgtcttgagtgctacaggaagctggcaccactacttcagagaacaaggccttttcctctcctcgctccagtatcccaatggcgcgccgagcttggctcgagctggcttgttgtccacaaccattaaaccttaaaagctttaaaagccttatatattcttttttttcttataaaacttaaaaccttagaggctatttaagttgctgatttatattaattttattgttcaaacatgagagcttagtacgtgaaacatgagagcttagtacattagccatgagagcttagtacattagccatgagggtttagttcattaaacatgagagcttagtacattaaacatgagagcttagtacatactatcaacaggttgaactgctgatctgtacagtagaattggtaaagagagttgtgtaaaatattgagttcgcacatcttgttgtctgattattgatttttggcgaaaccatttgatcatatgacaagatgtgtatctaccttaacttaatgattttgataaaaatcattaggtacc

SEQ ID NO: 19019 - DNA, 2117 bp, synthetic construct; identical to SEQ ID NO: 44
  source 1..2117: mol_type = other DNA

SEQ ID NO: 19020 - DNA, 9009 bp, synthetic construct
  source 1..9009: mol_type = other DNA
agatctaggaacccctagtgatggagttggccactccctctctgcgcgctcgctcgctcactgaggccgggcgaccaaaggtcgcccgacgcccgggctttgcccgggcggcctcagtgagcgagcgagcgcgcagctgcctgcaggggcgcctgatgcggtattttctccttacgcatctgtgcggatcccaatggcgcgccgagcttggctcgagcatggtcatagctgtttcctgtgtgaaattgttatccgctcacaattccacacaacatacgagccggaagcataaagtgtaaagcctggggtgcctaatgagtgagctaactcacattaattgcgttgcgctcactgcccgctttccagtcgggaaacctgtcgtgccagctgcattaatgaatcggccaacgcgcggggagaggcggtttgcgtattgggcgctcttccgcttcctcgctcactgactcgctgcgctcggtcgttcggctgcggcgagcggtatcagctcactcaaaggcggtaatacggttatccacagaatcaggggataacgcaggaaagaacatgtgagcaaaaggccagcaaaaggccaggaaccgtaaaaaggccgcgttgctggcgtttttccataggctccgcccccctgacgagcatcacaaaaatcgacgctcaagtcagaggtggcgaaacccgacaggactataaagataccaggcgtttccccctggaagctccctcgtgcgctctcctgttccgaccctgccgcttaccggatacctgtccgcctttctcccttcgggaagcgtggcgctttctcatagctcacgctgtaggtatctcagttcggtgtaggtcgttcgctccaagctgggctgtgtgcacgaaccccccgttcagcccgaccgctgcgccttatccggtaactatcgtcttgagtccaacccggtaagacacgacttatcgccactggcagcagccactggtaacaggattagcagagcgaggtatgtaggcggtgctacagagttcttgaagtggtggcctaactacggctacactagaagaacagtatttggtatctgcgctctgctgaagccagttaccttcggaaaaagagttggtagctcttgatccggcaaacaaaccaccgctggtagcggtggtttttttgtttgcaagcagcagattacgcgcagaaaaaaaggatctcaagaagatcctttgatcttttctacggggtctgacgctcagtggaacgaaaactcacgttaagggattttggtcatgagattatcaaaaaggatcttcacctagatccttttaaattaaaaatgaagttttaaatcaatctaaagtatatatgagtaaacttggtctgacagttagaaaaactcatcgagcatcaaatgaaactgcaatttattcatatcaggattatcaataccatatttttgaaaaagccgtttctgtaatgaaggagaaaactcaccgaggcagttccataggatggcaagatcctggtatcggtctgcgattccgactcgtccaacatcaatacaacctattaatttcccctcgtcaaaaataaggttatcaagtgagaaatcaccatgagtgacgactgaatccggtgagaatggcaaaagtttatgcatttctttccagacttgttcaacaggccagccattacgctcgtcatcaaaatcactcgcatcaaccaaaccgttattcattcgtgattgcgcctgagcgagacgaaatacgcgatcgctgttaaaaggacaattacaaacaggaatcgaatgcaaccggcgcaggaacactgccagcgcatcaacaatattttcacctgaatcaggatattcttctaatacctggaatgctgttttcccagggatcgcagtggtgagtaaccatgcatcatcaggagtacggataaaatgcttgatggtcggaagaggcataaattccgtcagccagtttagtctgaccatctcatctgtaacatcattggcaacgctacctttgccatgtttcagaaacaactctggcgcatcgggcttcccatacaatcgatagattgtcgcacctgattgcccgacattatcgcgagcccatttatacccatataaatcagcatccatgttggaatttaatcgcggcctagagcaagacgtttcccgttgaatatggctcatactcttcctttttcaatattattgaagcatttatcagggttattgtctcatgagcggatacatatttgaatgtatttagaaaaataaacaaataggggttccgcgcacatttccccgaaaagtgccacctgacgtctaagaaaccattattatcatgacattaacctataaaaataggcgtatcacgaggccctttcgtctcgcgcgtttcggtgatgacggtgaaaacctctgacacatgcagctcccggagacggtcacagcttgtctgtaagcggatgccgggagcagacaagcccgtcagggcgcgtcagcgggtgttggcgggtgtcggggctggcttaactatgcggcatcagagcagattgtactgagagtgcaccatatgcggtgtgaaataccgcacagatgcgtaaggagaaaataccgcatcaggcgccattcgccattcaggctgcgcaactgttgggaagggcgatcggtgcgggcctcttcgctattacgccagctggcgaaagggggatgtgctgcaaggcgattaagttgggtaacgccagggttttcccagtcacgacgttgtaaaacgacggccagtgaattgaacttgttacagaagccggggttcaaaacaccaaataatgcacttgtacctagtccttcccgggtgctctgcagacatttctccaagcgtagtctgcaaacaacctacatatgtagaattacctatgcacatttttcatttaacaaccaagagctacatttgtagcaaaatctgggttgtaacttagcctacagctgaagcctaagagattccgtctgtgagaagaaataacccacctctttggcccccctccccaggcaggaagccaggatggtccttatataaagttgtgctgtccaataggtaaccactagccacatatggctatttaaatttaaattaactacaattaagagaaattaaaaattcaattcctcaattgcacctgccaaattttaagcacataacaaccacatgtggctagtaactactgtattggagagtgcaagcggagatagaacactctattactgcagaaatttctattggatagcacttataatagtttagtgtaacttaaaactccctagttgccacagtcatgatttagtagtaatttcatggatttctctactgaggttagaatctctgccattagagactgataaatttaaagtttgcaattatcaaactggtgacaatttaagccagaatcaggtaaatgtcctcagttttaacagcattggaattttctgggactagctgtgtatctatccaggattcttgagaatgcctgccatttttcaacataatggatgtaaggtattacacatatacctggggatggggtggtaggtataattgcacaagcattgtggagaatggtatcaaagagtggcagaacatcacaatcaaggttttccctttcttttacctttgctttttaaaaagacaatatttgctggacctgatcttataactcataaatgggacactgtatgttcctttttacctcctctgtttctacttaattgcaccctatgaggactgcttcccttacctaccataaccccttccttcactcatccatatctttactcttcttcacaactctgtaatattgaccttctttatgaacctttcctggaacaatccctcttaagtgcaagcactgttattatgccttcaatgtatttaatatccatgtatctattctctctaattttgtcattttgtgttctcatgtattttcattcattatgtgtccaacttccatggataacatggttacaacaaaagatcctactttatgacaattatcttccttgggtttgtgggacatagaacagtgctcagagtaggggatccaagaacccaggagaatatattagctaagaagataacttccgtttttaaaagtccaagattcaggagatcaaaaccatcctggctaacatagtgaaaccccgtctcttccaaaaatacaaaaaattagcccggcgtggtggcaggcgcctatagtcccagctacacgggaggctgaggcaggagaatggcgtgaaccggggaggcggagctggcagtgagccgagatcccgccactgcactccagcctgggcgacagagcgagactccgtctcaaaaaaaaaaaaaaaaaaaaagtccaagattaaaaaaaaaaaaaaaaaaggatgtctgctttgtgagtttagcattgtctccttgtcattccagaaatgaaatggcaaatacatttaaatcagaactaaaaaggggaacagggtataaaggctcaatttagtcacatcatttccgtttctcacccaccccctttaaaccagatgtttgccaatgcattaacaatgcagatgtttcctgaaagaaagtttagtaactcaagcagacaccttattttcttttcaagcagaaaagactatgagatggtggttgtggttgttccgggagggagaagatataaatgatacacattatttcaaatcatttcatgacctcactgcacacttatagttattgtacctgttgtctttttgctgtcaagcctagctaagatcatttggaatgttcaagatcactcatacatgcatgtgcacacatacacatgcacatatgttcactccctatttcatccacatgaactaagattactgatgtgtacagattcaaagcacttttattcttttccaaaggcaagaagctgagctactttccagaatagttgtgaaagaccctgtcatacttctgcattgtttcctccacaccacctccatccagttccttatgaatggttactggttttcaaaaatatgagataaattgagtgtataaaagtcatttttagacaaaatgaaacaggaaatgaaagaaaccagaatctctcctcatttgtggatgggccagctccaccatgtcatggttaatctgcagggaggaaatactagatttgattgcagatcagactgcagcaaacctgctgtgactaaggcatcaagagaaagcaagcaacagctggggcttcagtggtgaaaacattatatatctagctttgaaatatgaaatactgtttagcagtgtcacctagaaaagagtgtttcaaaatgctgatgcttcataagaacctttctcttcagagttgtttcttttatctttcaaattagccagggtgggaaataaagtgatcacttggtgaagaaatctcacaaagaagaacatagagagttcactttcatctggagtaatgaacagattgaacaaactagaaatggttagtctgttaaagaaaaggtgtaggtgagctgtttgcaagagccacaagggaaaggggaagacaacttctttgtggacttaagggtgaaagttgcaagcaggcaagacgattctgacctccattaagaaagccctttccaaccaacaaccactgggttggttacgcaggttgggcagcattgggagcaaatgttgattgaacaaatgtttgtcggaattgttgacttaaagagctgttctgtcactggggacagcagcggctagatagccccattcagggagagggcatttgttcacctggccagagatcagagcaggctaagggactgctgggatcctgtccagctttgagaccctacagagccatgttcacctagcacgtatcccgtctgcggtcacgctcatttcttaccttattccagggctttcacctcagcttgccaggctggagccaagggccaacgcagccgcgccttgttcgcgatggtagcttcccaggagccccctatggttccggaacggcgctgccggccccatcctgtttgctacctcctaaagccaaaggcactggcgggccgggccagcttctaaagtcgcgcaaggttagaaggttccggacaggaacggcgtgaggccaatggaaggaggtacttcagtttccctccagatgcccagcgatgggctcagagctccttgagaactcgggaaaggaagcagggtctctgaagaaatacttcaggagtagaaagaggaagctagagggttaaatgcactacacaggaacagaaatgagtttttcttagagttagtatatgtctagaggtgtagtaaactaaaacaagtcttgaattgcataccgccacgtagggaagaaatgaaaacctttgaatattagtgaaaaaagggaaactgcaacgcctgtattactagatagctttcatcaacagctcaaaaccgacagatttaaagaagcaacaccgcattttggctttctaaagctttaatttggtttggatcccatgcccatgaccctgccagctgacaattctaagcatgcgcaaactggccccaaaaattcctcccacatttccgaagaactatttggccctttatgtgaagtacctggtttttccattttctgttttaccataggcctcagttcggtgtgtggcgtatttattgggatggttcctggccttttgctggccttttgctcacatgtcctgcaggcagctgcgcgctcgctcgctcactgaggccgcccgggcaaagcccgggcgtcgggcgacctttggtcgcccggcctcagtgagcgagcgagcgcgcagagagggagtggccaactccatcactaggggttcctgtcgacgaagactgtggatggcccctccgggaaactgtggcgtgatggccgcggggctctccagaacatcatccctgcctctactggcgctgccaaggctgtgggcaaggtcatccctgagctgaacgggaagctcactggcatggccttccgtgtccccactgccaacgtgtcagtggtggacctgacctgccgtctagaaaaacctgccaaatatgatgacatcaagaaggtggtgaagcaggcgtcggagggccccctcaagggcatcctgggctacactgagcaccaggtggtctcctctgacttcaacagcgacacccactcctccacctttgacgctggggctggcattgccctcaacgaccactttgtcaagctcatttcctggtatgtggctggggccagagactggctcttaaaaagtgcagggtctggcgccctctggtggctggctcagaaaaagggccctgacaactctttacatcttctaggtatgacaacgagttcggatatagcaatagagtggtcgatctgatggctcatatggctagcaaagagggaagcggagctactaacttcagcctgctgaagcaggctggagacgtggaggagaaccctggacctatggtgagcaagggcgaggagctgttcaccggggtggtgcccatcctggtcgagctggacggcgacgtaaacggccacaagttcagcgtgtccggcgagggcgagggcgatgccacctacggcaagctgaccctgaagttcatctgcaccaccggcaagctgcccgtgccctggcccaccctcgtgaccaccctgacctacggcgtgcagtgcttcagccgctaccccgaccacatgaagcagcacgacttcttcaagtccgccatgcccgaaggctacgtccaggagcgcaccatcttcttcaaggacgacggcaactacaagacccgcgccgaggtgaagttcgagggcgacaccctggtgaaccgcatcgagctgaagggcatcgacttcaaggaggacggcaacatcctggggcacaagctggagtacaactacaacagccacaacgtctatatcatggccgacaagcagaagaacggcatcaaggtgaacttcaagatccgccacaacatcgaggacggcagcgtgcagctcgccgaccactaccagcagaacacccccatcggcgacggccccgtgctgctgcccgacaaccactacctgagcacccagtccgccctgagcaaagaccccaacgagaagcgcgatcacatggtcctgctggagttcgtgaccgccgccgggatcactctcggcatggacgagctgtacaagtgagcggccgcgtcgagtctagagggcccgtttaaacccgctgatcagcctcgactgtgccttctagttgccagccatctgttgtttgcccctcccccgtgccttccttgaccctggaaggtgccactcccactgtcctttcctaataaaatgaggaaattgcatcgcattgtctgagtaggtgtcattctattctggggggtggggtggggcaggacagcaagggggaggattgggaagacaatagcaggcatgctggggatgcggtgggctctatggatttggctacagcaacagggtggtggacctcatggcccacatggcctccaaggagtaagacccctggaccaccagccccagcaagagcacaagaggaagagagagaccctcactgctggggagtccctgccacactcagtcccccaccacactgaatctcccctcctcacagttgccatgtagaccccttgaagaggggaggggcctagggagccgcaccttgtcatgtaccatcaataaagtaccctgtgctcaaccagttacttgtcctgtcttattctagggtctggggcagaggggagggaagctgggcttgtgtcaaggtgagacattcttgctggggagggacctggtatgttctcctcagactgagggtagggcctccaaacagccttgcttgcttcgagaaccatttgcttcccgctcagacgtcttgagtgctacaggaagctggcaccactacttcagagaacaaggccttttcctctcctcgctccagt

SEQ ID NO: 19021 - DNA, 3372 bp, synthetic construct
  source 1..3372: mol_type = other DNA
tcgaggaattcctggcttgttgtccacaaccattaaaccttaaaagctttaaaagccttatatattcttttttttcttataaaacttaaaaccttagaggctatttaagttgctgatttatattaattttattgttcaaacatgagagcttagtacgtgaaacatgagagcttagtacattagccatgagagcttagtacattagccatgagggtttagttcattaaacatgagagcttagtacattaaacatgagagcttagtacatactatcaacaggttgaactgctgatctgtacagtagaattggtaaagagagttgtgtaaaatattgagttcgcacatcttgttgtctgattattgatttttggcgaaaccatttgatcatatgacaagatgtgtatctaccttaacttaatgattttgataaaaatcattaggtaccgaattcacgcgtattgggatgaagactgtggatggcccctccgggaaactgtggcgtgatggccgcggggctctccagaacatcatccctgcctctactggcgctgccaaggctgtgggcaaggtcatccctgagctgaacgggaagctcactggcatggccttccgtgtccccactgccaacgtgtcagtggtggacctgacctgccgtctagaaaaacctgccaaatatgatgacatcaagaaggtggtgaagcaggcgtcggagggccccctcaagggcatcctgggctacactgagcaccaggtggtctcctctgacttcaacagcgacacccactcctccacctttgacgctggggctggcattgccctcaacgaccactttgtcaagctcatttcctggtatgtggctggggccagagactggctcttaaaaagtgcagggtctggcgccctctggtggctggctcagaaaaagggccctgacaactctttacatcttctaggtatgacaacgagttcggatatagcaatagagtggtcgatctgatggctcatatggctagcaaagagggaagcggagctactaacttcagcctgctgaagcaggctggagacgtggaggagaaccctggacctatggcactccccgtcaccgcccttctcttgcccctcgccctgctgctgcatgctgccaggcccatggacgaagtgcagctcgtggagtccggtggaggactcgtccaaccgggcggatcccttcgcttgtcctgcgccgcatcaggcttcagcttcaccaactatggcgtccactgggtcagacaggcccccggaaagggactggaatgggtgtccgtgatctggagcggcgggaacaccgactacaacacctccgtgaagggccggttcactattagccgcgacaactccaagaacactctgtacctccaaatgaactccctgagggccgaagatactgctgtgtactattgcgcgagagccctgacctactacgactacgagttcgcgtactggggccaggggactctcgtgaccgtgtccagcggtggtggaggttccggaggcggaggttctggtggcgggggatcagaaatcgtgctgactcagtcccctgcgaccttgtccctgagccctggagaacgggccaccctgagctgtagagccagccagagcatcgggacaaatattcactggtaccagcagaaacccggacaagcaccacggctgctgatctactacgcctccgagtcgatttccggaatcccggctcgcttttcggggtctggatcgggaacggacttcactctgaccatctcgtcgctggaacccgaggatttcgccgtgtactactgccaacagaacaacaattggccgaccacgttcggccagggcaccaagctcgagattaagggatcactggaagcggccgcaaccacaacacctgctccaaggccccccacacccgctccaactatagccagccaaccattgagcctcagacctgaagcttgcaggcccgcagcaggaggcgccgtccatacgcgaggcctggacttcgcgtgtgatatttatatttgggcccctttggccggaacatgtggggtgttgcttctctcccttgtgatcactctgtattgtaagcgcgggagaaagaagctcctgtacatcttcaagcagccttttatgcgacctgtgcaaaccactcaggaagaagatgggtgttcatgccgcttccccgaggaggaagaaggagggtgtgaactgagggtgaaattttctagaagcgccgatgctcccgcatatcagcagggtcagaatcagctctacaatgaattgaatctcggcaggcgagaagagtacgatgttctggacaagagacggggcagggatcccgagatggggggaaagccccggagaaaaaatcctcaggaggggttgtacaatgagctgcagaaggacaagatggctgaagcctatagcgagatcggaatgaaaggcgaaagacgcagaggcaaggggcatgacggtctgtaccagggtctctctacagccaccaaggacacttatgatgcgttgcatatgcaagccttgccaccccgctaagcggccgcgtcgagtctagagggcccgtttaaacccgctgatcagcctcgactgtgccttctagttgccagccatctgttgtttgcccctcccccgtgccttccttgaccctggaaggtgccactcccactgtcctttcctaataaaatgaggaaattgcatcgcattgtctgagtaggtgtcattctattctggggggtggggtggggcaggacagcaagggggaggattgggaagacaatagcaggcatgctggggatgcggtgggctctatggatttggctacagcaacagggtggtggacctcatggcccacatggcctccaaggagtaagacccctggaccaccagccccagcaagagcacaagaggaagagagagaccctcactgctggggagtccctgccacactcagtcccccaccacactgaatctcccctcctcacagttgccatgtagaccccttgaagaggggaggggcctagggagccgcaccttgtcatgtaccatcaataaagtaccctgtgctcaaccagttacttgtcctgtcttattctagggtctggggcagaggggagggaagctgggcttgtgtcaaggtgagacattcttgctggggagggacctggtatgttctcctcagactgagggtagggcctccaaacagccttgcttgcttcgagaaccatttgcttcccgctcagacgtcttgagtgctacaggaagctggcaccactacttcagagaacaaggccttttcctctcctcgctccagtatcccaatggcgcgccgagcttggc

SEQ ID NO: 19022 - DNA, 4909 bp, synthetic construct
  source 1..4909: mol_type = other DNA
tcgaggaattcctggcttgttgtccacaaccattaaaccttaaaagctttaaaagccttatatattcttttttttcttataaaacttaaaaccttagaggctatttaagttgctgatttatattaattttattgttcaaacatgagagcttagtacgtgaaacatgagagcttagtacattagccatgagagcttagtacattagccatgagggtttagttcattaaacatgagagcttagtacattaaacatgagagcttagtacatactatcaacaggttgaactgctgatctgtacagtagaattggtaaagagagttgtgtaaaatattgagttcgcacatcttgttgtctgattattgatttttggcgaaaccatttgatcatatgacaagatgtgtatctaccttaacttaatgattttgataaaaatcattaggtaccgaattcacgcgtattgggatgaagactgtggatggcccctccgggaaactgtggcgtgatggccgcggggctctccagaacatcatccctgcctctactggcgctgccaaggctgtgggcaaggtcatccctgagctgaacgggaagctcactggcatggccttccgtgtccccactgccaacgtgtcagtggtggacctgacctgccgtctagaaaaacctgccaaatatgatgacatcaagaaggtggtgaagcaggcgtcggagggccccctcaagggcatcctgggctacactgagcaccaggtggtctcctctgacttcaacagcgacacccactcctccacctttgacgctggggctggcattgccctcaacgaccactttgtcaagctcatttcctggtatgtggctggggccagagactggctcttaaaaagtgcagggtctggcgccctctggtggctggctcagaaaaagggccctgacaactctttacatcttctaggtatgacaacgagttcggatatagcaatagagtggtcgatctgatggctcatatggctagcaaagagggaagcggagctactaacttcagcctgctgaagcaggctggagacgtggaggagaaccctggacctatgcttctcctggtgacaagccttctgctctgtgagttaccacacccagcattcctcctgatcccagacatccagatgacacagactacatcctccctgtctgcctctctgggagacagagtcaccatcagttgcagggcaagtcaggacattagtaaatatttaaattggtatcagcagaaaccagatggaactgttaaactcctgatctaccatacatcaagattacactcaggagtcccatcaaggttcagtggcagtgggtctggaacagattattctctcaccattagcaacctggagcaagaagatattgccacttacttttgccaacagggtaatacgcttccgtacacgttcggaggggggactaagttggaaataacaggctccacctctggatccggcaagcccggatctggcgagggatccaccaagggcgaggtgaaactgcaggagtcaggacctggcctggtggcgccctcacagagcctgtccgtcacatgcactgtctcaggggtctcattacccgactatggtgtaagctggattcgccagcctccacgaaagggtctggagtggctgggagtaatatggggtagtgaaaccacatactataattcagctctcaaatccagactgaccatcatcaaggacaactccaagagccaagttttcttaaaaatgaacagtctgcaaactgatgacacagccatttactactgtgccaaacattattactacggtggtagctatgctatggactactggggtcaaggaacctcagtcaccgtctcctcagcggccgcaattgaagttatgtatcctcctccttacctagacaatgagaagagcaatggaaccattatccatgtgaaagggaaacacctttgtccaagtcccctatttcccggaccttctaagcccttttgggtgctggtggtggttgggggagtcctggcttgctatagcttgctagtaacagtggcctttattattttctgggtgaggagtaagaggagcaggctcctgcacagtgactacatgaacatgactccccgccgccccgggcccacccgcaagcattaccagccctatgccccaccacgcgacttcgcagcctatcgctccagagtgaagttcagcaggagcgcagacgcccccgcgtaccagcagggccagaaccagctctataacgagctcaatctaggacgaagagaggagtacgatgttttggacaagagacgtggccgggaccctgagatggggggaaagccgagaaggaagaaccctcaggaaggcctgtacaatgaactgcagaaagataagatggcggaggcctacagtgagattgggatgaaaggcgagcgccggaggggcaaggggcacgatggcctttaccagggtctcagtacagccaccaaggacacctacgacgcccttcacatgcaggccctgccccctcgcggaagcggagccacaaacttctctctgctgaagcaggcaggagatgttgaagaaaaccctggacctatgagccggagcgtggctctggccgtgctggccctgctgagcctgagcggcctcgaggctgtgatggcccctcggaccctgattctgggtggcggtggatccggtggcggtggatccggtggcggtggatccattcagcggacacccaaaatccaggtgtacagccggcatcccgccgaaaacggcaagagcaatttcctgaactgttacgtgagcggcttccaccccagcgacattgaagtggacctgctgaaaaacggcgagcggattgaaaaagtggaacacagcgacctgagctttagcaaagattggagcttttacctgctgtattacaccgaattcacccccaccgagaaggatgagtacgcctgccgggtgaaccatgtgaccctgagccagccaaaaatcgtgaagtgggatcgggatatgggtggcggtggatccggtggcggtggatccggtggcggtggatccggcagccatagcctgaaatactttcacaccagcgtgagccggcctggccggggcgagccacggtttatcagcgtgggctatgtggacgatacccagtttgtgcggtttgacaatgacgctgccagccctcggatggtgccacgggctccctggatggaacaggagggcagcgaatattgggaccgggaaacccggagcgcccgggataccgcccagattttccgggtgaatctgcggaccctgcggggctactataaccagagcgaagctggcagccatacactgcagtggatgcacggctgtgagctgggcccagatggccggttcctgcggggctatgaacagtttgcctatgatggcaaagactatctgacactgaatgaagacctgcggagctggaccgccgtggacacagctgcccagattagcgagcagaagagcaatgatgccagcgaggccgagcatcagcgggcttacctggaggacacatgcgtggagtggctgcataaatatctggaaaaaggcaaggagacactgctgcatctggaacctccaaagacccacgtgacacaccatcctattagcgatcacgaggctaccctgcggtgctgggccctgggcttctaccccgccgagatcaccctgacctggcagcaggatggcgaaggccacacccaggataccgagctggtggaaacacggcctgccggcgacggcacattccagaagtgggctgccgtggtggtgcccagcggcgaagagcagcggtacacctgccatgtgcagcacgaaggcctgcctgaaccagtgaccctgcggtggaaaccagccagccagcccaccatccccatcgtgggcattatcgctggcctggtgctgctgggcagcgtggtgagcggcgccgtggtggccgctgtgatttggcggaagaaaagcagcggcggcaaaggcggcagctacagcaaggccgagtggagcgacagcgctcagggcagcgaaagccacagcctgtaaagcggccgcgtcgagtctagagggcccgtttaaacccgctgatcagcctcgactgtgccttctagttgccagccatctgttgtttgcccctcccccgtgccttccttgaccctggaaggtgccactcccactgtcctttcctaataaaatgaggaaattgcatcgcattgtctgagtaggtgtcattctattctggggggtggggtggggcaggacagcaagggggaggattgggaagacaatagcaggcatgctggggatgcggtgggctctatggatttggctacagcaacagggtggtggacctcatggcccacatggcctccaaggagtaagacccctggaccaccagccccagcaagagcacaagaggaagagagagaccctcactgctggggagtccctgccacactcagtcccccaccacactgaatctcccctcctcacagttgccatgtagaccccttgaagaggggaggggcctagggagccgcaccttgtcatgtaccatcaataaagtaccctgtgctcaaccagttacttgtcctgtcttattctagggtctggggcagaggggagggaagctgggcttgtgtcaaggtgagacattcttgctggggagggacctggtatgttctcctcagactgagggtagggcctccaaacagccttgcttgcttcgagaaccatttgcttcccgctcagacgtcttgagtgctacaggaagctggcaccactacttcagagaacaaggccttttcctctcctcgctccagtatcccaatggcgcgccgagcttggc

SEQ ID NO: 19023 - DNA, 3357 bp, synthetic construct
  source 1..3357: mol_type = other DNA
tcgaggaattcctggcttgttgtccacaaccattaaaccttaaaagctttaaaagccttatatattcttttttttcttataaaacttaaaaccttagaggctatttaagttgctgatttatattaattttattgttcaaacatgagagcttagtacgtgaaacatgagagcttagtacattagccatgagagcttagtacattagccatgagggtttagttcattaaacatgagagcttagtacattaaacatgagagcttagtacatactatcaacaggttgaactgctgatctgtacagtagaattggtaaagagagttgtgtaaaatattgagttcgcacatcttgttgtctgattattgatttttggcgaaaccatttgatcatatgacaagatgtgtatctaccttaacttaatgattttgataaaaatcattaggtaccgaattcacgcgtattgggatgaagactgtggatggcccctccgggaaactgtggcgtgatggccgcggggctctccagaacatcatccctgcctctactggcgctgccaaggctgtgggcaaggtcatccctgagctgaacgggaagctcactggcatggccttccgtgtccccactgccaacgtgtcagtggtggacctgacctgccgtctagaaaaacctgccaaatatgatgacatcaagaaggtggtgaagcaggcgtcggagggccccctcaagggcatcctgggctacactgagcaccaggtggtctcctctgacttcaacagcgacacccactcctccacctttgacgctggggctggcattgccctcaacgaccactttgtcaagctcatttcctggtatgtggctggggccagagactggctcttaaaaagtgcagggtctggcgccctctggtggctggctcagaaaaagggccctgacaactctttacatcttctaggtatgacaacgagttcggatatagcaatagagtggtcgatctgatggctcatatggctagcaaagagggaagcggagctactaacttcagcctgctgaagcaggctggagacgtggaggagaaccctggacctatgcttctcctggtgacaagccttctgctctgtgagttaccacacccagcattcctcctgatcccagacatccagatgacacagactacatcctccctgtctgcctctctgggagacagagtcaccatcagttgcagggcaagtcaggacattagtaaatatttaaattggtatcagcagaaaccagatggaactgttaaactcctgatctaccatacatcaagattacactcaggagtcccatcaaggttcagtggcagtgggtctggaacagattattctctcaccattagcaacctggagcaagaagatattgccacttacttttgccaacagggtaatacgcttccgtacacgttcggaggggggactaagttggaaataacaggctccacctctggatccggcaagcccggatctggcgagggatccaccaagggcgaggtgaaactgcaggagtcaggacctggcctggtggcgccctcacagagcctgtccgtcacatgcactgtctcaggggtctcattacccgactatggtgtaagctggattcgccagcctccacgaaagggtctggagtggctgggagtaatatggggtagtgaaaccacatactataattcagctctcaaatccagactgaccatcatcaaggacaactccaagagccaagttttcttaaaaatgaacagtctgcaaactgatgacacagccatttactactgtgccaaacattattactacggtggtagctatgctatggactactggggtcaaggaacctcagtcaccgtctcctcagcggccgcaattgaagttatgtatcctcctccttacctagacaatgagaagagcaatggaaccattatccatgtgaaagggaaacacctttgtccaagtcccctatttcccggaccttctaagcccttttgggtgctggtggtggttgggggagtcctggcttgctatagcttgctagtaacagtggcctttattattttctgggtgaggagtaagaggagcaggctcctgcacagtgactacatgaacatgactccccgccgccccgggcccacccgcaagcattaccagccctatgccccaccacgcgacttcgcagcctatcgctccagagtgaagttcagcaggagcgcagacgcccccgcgtaccagcagggccagaaccagctctataacgagctcaatctaggacgaagagaggagtacgatgttttggacaagagacgtggccgggaccctgagatggggggaaagccgagaaggaagaaccctcaggaaggcctgtacaatgaactgcagaaagataagatggcggaggcctacagtgagattgggatgaaaggcgagcgccggaggggcaaggggcacgatggcctttaccagggtctcagtacagccaccaaggacacctacgacgcccttcacatgcaggccctgccccctcgctaagcggccgcgtcgagtctagagggcccgtttaaacccgctgatcagcctcgactgtgccttctagttgccagccatctgttgtttgcccctcccccgtgccttccttgaccctggaaggtgccactcccactgtcctttcctaataaaatgaggaaattgcatcgcattgtctgagtaggtgtcattctattctggggggtggggtggggcaggacagcaagggggaggattgggaagacaatagcaggcatgctggggatgcggtgggctctatggatttggctacagcaacagggtggtggacctcatggcccacatggcctccaaggagtaagacccctggaccaccagccccagcaagagcacaagaggaagagagagaccctcactgctggggagtccctgccacactcagtcccccaccacactgaatctcccctcctcacagttgccatgtagaccccttgaagaggggaggggcctagggagccgcaccttgtcatgtaccatcaataaagtaccctgtgctcaaccagttacttgtcctgtcttattctagggtctggggcagaggggagggaagctgggcttgtgtcaaggtgagacattcttgctggggagggacctggtatgttctcctcagactgagggtagggcctccaaacagccttgcttgcttcgagaaccatttgcttcccgctcagacgtcttgagtgctacaggaagctggcaccactacttcagagaacaaggccttttcctctcctcgctccagtatcccaatggcgcgccgagcttggc
